(19) United States
(12) Patent Application Publication
(10) Pub. No.: US 2020/0263186 A1
(43) Pub. Date: Aug. 20, 2020

(54) ALTERED GUIDE RNAS FOR MODULATING CAS9 ACTIVITY AND METHODS OF USE

(71) Applicant: North Carolina State University, Raleigh, NC (US)

(72) Inventors: Rodolphe Barrangou, Raleigh, NC (US); Alexandra Briner Crawley, Raleigh, NC (US)

(21) Appl. No.: 16/616,655

(22) PCT Filed: May 24, 2018
(86) PCT No.: PCT/US2018/034322

§ 371 Date: Nov. 25, 2019

Related U.S. Application Data
(60) Provisional application No. 62/511,462, filed on May 26, 2017.

(51) Int. Cl. C12N 15/63; A61K 47/54; C12N 15/10; C12N 15/90; C12N 9/22; C12N 15/11

(52) U.S. Cl. CPC C12N 15/63; A61K 47/549; C12N 15/102; C12N 15/90; C12N 2310/533; C12N 15/111; C12N 2310/20; C12N 2310/3519; C12N 9/22

(57) ABSTRACT

The present invention is directed to modified CRISPR-cas guides that modulate the activity of Cas9 polypeptides to which the synthetic guides are complexed. In addition, methods of use of the modified CRISPR-guides are provided.

### STATEMENT REGARDING ELECTRONIC FILING OF A SEQUENCE LISTING

[0001] A Sequence Listing in ASCII text format, submitted under 37 C.F.R. § 1.821, entitled 5051-920WO_ST25.txt, 1,673,631 bytes in size, generated on May 22, 2018 and filed via EFS-Web, is provided in lieu of a paper copy. This Sequence Listing is hereby incorporated herein by reference into the specification for its disclosures.

### STATEMENT OF PRIORITY

[0002] This application claims the benefit, under 35 U.S.C. § 119 (e), of U.S. Provisional Application No. 62/511,462 filed on May 26, 2017, the entire contents of which is incorporated by reference herein.

### FIELD OF THE INVENTION

[0003] The invention relates to synthetic CRISPR-cas guides and methods of use thereof for site-specific cleavage and nicking, transcriptional control and DNA editing.

### BACKGROUND OF THE INVENTION

[0004] Clustered Regularly Interspaced Short Palindromic Repeats (CRISPR), in combination with associated sequences (cas) constitute the CRISPR-Cas system, which confers adaptive immunity in many bacteria. CRISPR-mediated immunization occurs through the uptake of DNA from invasive genetic elements such as plasmids and phages, as novel “spacers.”

[0005] CRISPR-Cas systems consist of arrays of short DNA repeats interspaced by hypervariable sequences, flanked by cas genes, that provide adaptive immunity against invasive genetic elements such as phage and plasmids, through sequence-specific targeting and interference (Barrangou et al. 2007. Science. 315:1709-1712; Brouns et al. 2008. Science 321:960-4; Horvath and Barrangou. 2010. Science. 327:167-70; Marraffini and Sontheimer. 2008. Science. 322:1843-1845; Bhaya et al. 2011. Annu. Rev. Genet. 45:273-297; Terns and Terns. 2011. Curr. Opin. Microbiol. 14:321-327; Westra et al. 2012. Annu. Rev. Genet. 46:311-339; Barrangou R. 2013. RNA. 4:267-278). Typically, invasive DNA sequences are acquired as novel “spacers” (Barrangou et al. 2007. Science. 315:1709-1712), each paired with a CRISPR repeat and inserted as a novel repeat-spacer unit in the CRISPR locus.

[0006] Subsequently, the repeat-spacer array is transcribed as a long pre-CRISPR RNA (pre-crRNA) (Brouns et al. 2008. Science 321:960-4), which is processed into small interfering CRISPR RNAs (crRNAs) that drive sequence-specific recognition. Specifically, crRNAs guide nucleases towards complementary targets for sequence-specific nucleic acid cleavage mediated by Cas endonucleases (Garneau et al. 2010. Nature. 468:67-71; Haurwitz et al. 2010. Science. 329:1355-1358; Sapranauskas et al. 2011. Nucleic Acid Res. 39:9275-9282; Jinek et al. 2012. Science. 337:816-821; Gasiunas et al. 2012. Proc. Natl. Acad. Sci. 109:E2579-E2586; Magadan et al. 2012. PLoS One. 7:e40913; Karvelis et al. 2013. RNA Biol. 10:841-851). These widespread systems occur in nearly half of bacteria (˜46%) and the large majority of archaea (˜90%). They are classified into six main CRISPR-Cas systems types (Makarova et al. 2011. Nature Rev. Microbiol. 9:467-477; Makarova et al. 2013. Nucleic Acid Res. 41:4360-4377; Makarova et al. 2015. Nature Rev. Microbiol. 13:722-736) based on the cas gene content, organization and variation in the biochemical processes that drive crRNA biogenesis, and Cas protein complexes that mediate target recognition and cleavage. In types I, III and IV, the specialized Cas endonucleases process the pre-crRNAs, which then assemble into a large multi-Cas protein complex capable of recognizing and cleaving nucleic acids complementary to the crRNA. A different process is involved in Type II CRISPR-Cas systems. Here, the pre-CRNAs are processed by a mechanism in which a trans-activating crRNA (tracrRNA) hybridizes to repeat regions of the crRNA. The hybridized crRNA-tracrRNA are cleaved by RNase III and following a second event that removes the 5′ end of each spacer, mature crRNAs are produced that remain associated with the both the tracrRNA and Cas9. The mature complex then locates a target dsDNA sequence (‘protospacer’ sequence) that is complementary to the spacer sequence in the complex and cuts both strands. Target recognition and cleavage by the complex in the Type II system not only requires a sequence that is complementary between the spacer sequence on the crRNA-tracrRNA complex and the target ‘protospacer’ sequence but also requires a protospacer adjacent motif (PAM) sequence located at the 3′ end of the protospacer sequence. The exact PAM sequence that is required can vary between different Type II systems.

[0007] The present disclosure provides modified guides and methods for making such guides for use in modulating the efficiency and specificity of synthetic Type II CRISPR-Cas systems in such uses as, for example, site-specific cleavage, site-specific nicking, transcriptional control and genome editing.

### SUMMARY OF THE INVENTION

[0008] A first aspect of the invention provides a synthetic nucleic acid construct, comprising: (a) a crRNA comprising a 3′ region and a 5′ region, wherein the 3′ region comprises at least about 10 consecutive nucleotides of a CRISPR repeat, and/or a functional fragment of the CRISPR repeat, and the 5′ region comprises at least about 20 consecutive nucleotides of a spacer sequence located immediately upstream of the repeat; (b) a tracrRNA comprising a 5′ and a 3′ region, wherein at least a portion of the 5′ region of the tracrRNA is complementary to the 3′ region (i.e., CRISPR repeat) of the crRNA, wherein, when the 5′ region of the tracrRNA that is complementary to the 3′ region of the crRNA hybridizes to the 3′ region of the crRNA, the synthetic nucleic acid construct forms secondary structures from 5′ to 3′ of: (i) a stem, the stem comprising a duplex between the 5′ end of the tracrRNA and the repeat of the crRNA, and optionally, the stem further comprising a kink or a bulge; (ii) a nexus hairpin; (iii) at least one terminal hairpin; and (c) optionally, a linker that when present links the 3′end of the crRNA to the 5′ end of the tracrRNA, wherein the construct comprises an insertion, substitution, and/or deletion of about one to about five nucleotides or base pairs in the nexus hairpin as compared to a wild type Type II crRNA:tracrRNA duplex; and/or an insertion, substitution and/or deletion of about one to about nine nucleotides and/or base pairs in the stem as compared to a wild type Type II crRNA:tracrRNA duplex.

[0009] A second aspect of the invention provides a protein-RNA complex, comprising: (a) a Cas9 polypeptide; and (b) a synthetic nucleic acid construct of the invention.

[0010] A third aspect of the invention provides a method of producing a modified Type II crRNA:tracrRNA construct, comprising: (a) inserting, substituting, and/or deleting about one to about five nucleotides or base pairs in the nexus hairpin of a Type II crRNA:tracrRNA; and/or (b) inserting, substituting, and/or deleting about one to about nine nucleotides and/or base pairs in a stem of the Type II crRNA:tracrRNA, wherein the crRNA comprises a 3′ region and a 5′ region, the 3′ region comprising at least about 10 consecutive nucleotides of a CRISPR repeat, and/or a functional fragment of the repeat, and the 5′ region comprises at least about 20 consecutive nucleotides of a spacer sequence located immediately upstream of the repeat, and the tracrRNA comprises a 5′ and a 3′ region, and at least a portion of the 5′ region of the tracrRNA is complementary to the 3′ region (i.e., CRISPR repeat) of the crRNA, further wherein, when the 5′ region of the tracrRNA that is complementary to the 3′ region of the crRNA hybridizes to the 3′ region of the crRNA, the Type II crRNA:tracrRNA forms secondary structures from 5′ to 3′ of: (i) a stem, the stem comprising a duplex between the 5′ end of the tracrRNA and the repeat of the crRNA, and optionally, the stem further comprising a kink or a bulge; (ii) a nexus hairpin; (iii) at least one terminal hairpin; and (c) optionally, a linker that when present links the 3′end of the crRNA to the 5′ end of the tracrRNA (i.e., linking the 3′ end and 5′ end of the stem), thereby producing a modified Type II rRNA:tracrRNAs construct as compared to a wild type Type II crRNA:tracrRNA duplex.

[0011] A fourth aspect of the invention provides a method of modifying the activity of a Cas9 polypeptide, comprising complexing the Cas9 polypeptide with a synthetic nucleic acid construct of the invention, thereby modifying the activity of a Cas9 polypeptide as compared to a Cas9 polypeptide complexed with a wild type Type II crRNA:tracrRNA duplex.

[0012] A fifth aspect of the invention provides a method of controlling transcription of a target DNA, comprising: contacting the target DNA with a synthetic nucleic acid construct of the invention and/or an expression cassette and/or vector comprising the synthetic nucleic acid construct, in the presence of a Cas9 polypeptide, wherein the synthetic nucleic acid construct binds to the target DNA, thereby controlling the transcription of the target DNA.

[0013] A sixth aspect of the invention provides a method of controlling transcription of a target DNA, comprising: contacting the target DNA with a protein-RNA complex of the present invention, and/or an expression cassette and/or a vector comprising a synthetic nucleic acid construct and encoding a Cas9 polypeptide of the protein-RNA complex, wherein the protein RNA complex binds to the target DNA, thereby controlling the transcription of the target DNA.

[0014] A seventh aspect of the invention provides a method for site-specific cleavage of a target DNA, comprising: contacting the target DNA with a synthetic nucleic acid construct of the present invention, and/or an expression cassette and/or a vector comprising the synthetic nucleic acid construct, in the presence of a Cas9 polypeptide, thereby producing a site specific cleavage of the target DNA in a region defined by complementary binding of the spacer sequence of the crRNA of said synthetic nucleic acid construct to the target DNA.

[0015] An eighth aspect of the invention provides a method for site-specific cleavage of a target DNA, comprising: contacting the target DNA with a protein-RNA complex of the present invention, and/or an expression cassette and/or a vector comprising a synthetic nucleic acid construct and encoding a Cas9 polypeptide of the protein-RNA complex, thereby producing a site specific cleavage of the target DNA in a region defined by complementary binding of the spacer sequence of the crRNA of the protein-RNA complex to the target DNA.

[0016] A ninth aspect of the invention provides a method of editing a target DNA, comprising: contacting the target DNA with a synthetic nucleic acid construct of the present invention, and/or with an expression cassette and/or a vector comprising the synthetic nucleic acid construct, in the presence of a Cas9 polypeptide, wherein the synthetic nucleic acid construct binds to the target DNA, thereby editing the target DNA.

[0017] A tenth aspect of the invention provides a method of editing a target DNA, comprising: contacting the target DNA with a protein-RNA complex of the present invention, and/or an expression cassette and/or a vector comprising a synthetic nucleic acid construct and encoding a Cas9 polypeptide of the protein-RNA complex, wherein the protein-RNA complex binds to the target DNA, thereby editing the target DNA.

[0018] An eleventh aspect of the invention provides a method for site-specific nicking of a (+) strand of a double stranded target DNA, comprising: contacting the double stranded target DNA with a protein-RNA complex of the present invention, and/or an expression cassette and/or a vector comprising a synthetic nucleic acid construct and encoding a Cas9 polypeptide of the protein-RNA complex, wherein the Cas9 polypeptide, comprises a point mutation in an RuvC active site motif, and the Cas9 polypeptide cleaves the (+) strand of the double stranded DNA, thereby producing a site-specific nick in said double stranded target DNA.

[0019] A twelfth aspect of the invention provides a method for site-specific nicking of a (−) strand of a double stranded target DNA, comprising: contacting the double stranded target DNA with a protein-RNA complex of the present invention, and/or an expression cassette and/or a vector comprising a synthetic nucleic acid construct and encoding a Cas9 polypeptide of the protein-RNA complex, wherein the Cas9 polypeptide, comprises a point mutation in an HNH active site motif, and the Cas9 polypeptide cleaves the (−) strand of the double stranded DNA, thereby producing a site-specific nick in said double stranded target DNA.

[0020] The invention further provides expression cassettes, vectors and cells comprising the synthetic nucleic acids constructs of this invention.

[0021] These and other aspects of the invention are set forth in more detail in the description of the invention below.

### BRIEF DESCRIPTION OF THE SEQUENCES IN THE SEQUENCE LISTING

[0022] SEQ ID NOs:1-98 are example nucleotide sequences comprising wild type crRNA repeat sequences useful with this invention.

[0023] SEQ ID NOs:99-193 are example wild type tracrRNA nucleotide sequences useful with this invention.

[0024] SEQ ID NOs:194-293 are example Cas9 polypeptide sequences useful with the present invention.

[0025] SEQ ID NOs:294-388 are the example Cas9 nucleotide sequences useful with this invention and encoding the respective Cas9 polypeptide sequences, SEQ ID NOs:194-293.

### BRIEF DESCRIPTION OF THE DRAWINGS

[0026] FIG. 1 show the process for modifying and selecting mutant single guides for Lactobacillus gasseri. Panel A shows the wild type L. gasseri duplex and an example of a synthetic mutant guide of the invention. Panel B shows cloning of a guide into a transformation vector. FIG. 1, panels C-E show the process for distinguish the functionality of the different mutant guides following of the transformation of the mutant guides into L. gasseri.

[0027] FIG. 2 show the wild type single guide Lactobacillus gasseri (Lga) Type II crRNA:tracrRNA duplex and mutant single guides based on the Lga Type II duplex. Panel A shows the wild type single guide RNA sequence and structure. The 5 modules of guide RNAs are provided left to right as follows: stem (lower stem (black), bulge (light grey), upper stem (dark grey), nexus (medium grey), terminal hairpin(s) (dark grey). Panel B provides a graph of the data showing recovered transformants from sgRNA delivery. The ability of recovered cells to utilize fructose is shown by the black and grey stacked bars. Grey demonstrates cells that were unable to utilize fructose, while black demonstrates native ability to utilize fructose. Panel C shows the mutations made to each guide. Only the module of the guide that was mutated is shown. The specific nucleotides that were mutated are in white surrounded by a circle and/or are in larger font than the non-mutated nucleotides.

[0028] FIG. 3 shows the full structures of example mutant single guides discussed in Panela A-C. Mutations are shown as bold and larger font than the non-mutated nucleotides.

[0029] FIG. 4 shows example WT single guides for various bacteria that may be used as templates for modifying single guides as described herein: Streptococcus pyrogenes, Lactobacillus rhamnosus, Lactobacillus jensenii, Lactobacillus casei, Lactobacillus gasseri, Lactobacillus buchneri, Oenococcus kitaharae, Streptococcus thermophiles CRISPR1, Lactobacillus animalis and Lactobacillus mali. The rights panel shows the generic structures of these guides without nucleotides. The spacer, stem, nexus and hairpin regions are distinguished in each of the structures by the different shades of grey or black.

[0030] FIG. 5 shows CRISPR repeats sequence alignment. For each cluster, CRISPR repeat sequence alignments are shown, with conserved and consensus nucleotides specified at the bottom of each family, with Sth3 (top), Sth1 (middle) and Lb (bottom) families.

[0031] FIG. 6 shows tracrRNA and repeat sequence alignments for Streptococcus species/strains.

[0032] FIG. 7 shows tracrRNA and repeat sequence alignments for Streptococcus species/strains.

[0033] FIG. 8 shows tracrRNA and repeat sequence alignments for Lactobacillus species/strains.

[0034] FIG. 9 shows tracrRNA and repeat sequence alignments for Lactobacillus species/strains.

[0035] FIG. 10 provides example repeat sequences and tracrRNA sequence from various organisms.

### DETAILED DESCRIPTION OF THE INVENTION

[0036] The present invention now will be described hereinafter with reference to the accompanying drawings and examples, in which embodiments of the invention are shown. This description is not intended to be a detailed catalog of all the different ways in which the invention may be implemented, or all the features that may be added to the instant invention. For example, features illustrated with respect to one embodiment may be incorporated into other embodiments, and features illustrated with respect to a particular embodiment may be deleted from that embodiment. Thus, the invention contemplates that in some embodiments of the invention, any feature or combination of features set forth herein can be excluded or omitted. In addition, numerous variations and additions to the various embodiments suggested herein will be apparent to those skilled in the art in light of the instant disclosure, which do not depart from the instant invention. Hence, the following descriptions are intended to illustrate some particular embodiments of the invention, and not to exhaustively specify all permutations, combinations and variations thereof.

[0037] Unless otherwise defined, all technical and scientific terms used herein have the same meaning as commonly understood by one of ordinary skill in the art to which this invention belongs. The terminology used in the description of the invention herein is for the purpose of describing particular embodiments only and is not intended to be limiting of the invention.

[0038] All publications, patent applications, patents and other references cited herein are incorporated by reference in their entireties for the teachings relevant to the sentence and/or paragraph in which the reference is presented.

[0039] Unless the context indicates otherwise, it is specifically intended that the various features and embodiments of the invention described herein can be used in any combination. Moreover, the present invention also contemplates that in some embodiments of the invention, any feature or combination of features set forth herein can be excluded or omitted. To illustrate, if the specification states that a composition comprises components A, B and C, it is specifically intended that any of A, B or C, or a combination thereof, can be omitted and disclaimed singularly or in any combination.

[0040] As used in the description of the invention and the appended claims, the singular forms “a,” “an” and “the” are intended to include the plural forms as well, unless the context clearly indicates otherwise.

[0041] Also as used herein, “and/or” refers to and encompasses any and all possible combinations of one or more of the associated listed items, as well as the lack of combinations when interpreted in the alternative (“or”).

[0042] The term “about,” as used herein when referring to a measurable value such as a dosage or time period and the like, is meant to encompass variations of ±20%, ±10%, ±5%, ±1%, ±0.5%, or even ±0.1% of the specified amount.

[0043] As used herein, phrases such as “between X and Y” and “between about X and Y” should be interpreted to include X and Y. As used herein, phrases such as “between about X and Y” mean “between about X and about Y” and phrases such as “from about X to Y” mean “from about X to about Y.”

[0044] The term “comprise,” “comprises” and “comprising” as used herein, specify the presence of the stated features, integers, steps, operations, elements, and/or components, but do not preclude the presence or addition of one or more other features, integers, steps, operations, elements, components, and/or groups thereof.

[0045] As used herein, the transitional phrase “consisting essentially of” means that the scope of a claim is to be interpreted to encompass the specified materials or steps recited in the claim and those that do not materially affect the basic and novel characteristic(s) of the claimed invention. Thus, the term “consisting essentially of” when used in a claim of this invention is not intended to be interpreted to be equivalent to “comprising.”

[0046] As used herein, the terms “increase,” “increasing,” “increased,” “enhance,” “enhanced,” “enhancing,” and “enhancement” (and grammatical variations thereof) describe an elevation of at least about 25%, 50%, 75%, 100%, 150%, 200%, 300%, 400%, 500% or more as compared to a control.

[0047] As used herein, the terms “reduce,” “reduced,” “reducing,” “reduction,” “diminish,” “suppress,” and “decrease” (and grammatical variations thereof), describe, for example, a decrease of at least about 5%, 10%, 15%, 20%, 25%, 35%, 50%, 75%, 80%, 85%, 90%, 95%, 97% or more, as compared to a control. In particular embodiments, the reduction results in no or essentially no (i.e., an insignificant amount, e.g., less than about 10% or even 5%) detectable activity or amount.

[0048] A “heterologous” or a “recombinant” nucleotide sequence is a nucleotide sequence not naturally associated with a host cell into which it is introduced, including non-naturally occurring multiple copies of a naturally occurring nucleotide sequence.

[0049] A “native” or “wild type” nucleic acid, nucleotide sequence, polypeptide or amino acid sequence refers to a naturally occurring or endogenous nucleic acid, nucleotide sequence, polypeptide or amino acid sequence. Thus, for example, a “wild type mRNA” is an mRNA that is naturally occurring in or endogenous to the organism. A “homologous” nucleic acid sequence is a nucleotide sequence naturally associated with a host cell into which it is introduced.

[0050] As used herein, the terms “nucleic acid,” “nucleic acid molecule,” “nucleotide sequence” and “polynucleotide” refer to RNA or DNA that is linear or branched, single or double stranded, or a hybrid thereof. The term also encompasses RNA/DNA hybrids. When dsRNA is produced synthetically, less common bases, such as inosine, 5-methylcytosine, 6-methyladenine, hypoxanthine and others can also be used for antisense, dsRNA, and ribozyme pairing. For example, polynucleotides that contain C-5 propyne analogues of uridine and cytidine have been shown to bind RNA with high affinity and to be potent antisense inhibitors of gene expression. Other modifications, such as modification to the phosphodiester backbone, or the 2′-hydroxy in the ribose sugar group of the RNA can also be made.

[0051] As used herein, the term “nucleotide sequence” refers to a heteropolymer of nucleotides or the sequence of these nucleotides from the 5′ to 3′ end of a nucleic acid molecule and includes DNA or RNA molecules, including cDNA, a DNA fragment or portion, genomic DNA, synthetic (e.g., chemically synthesized) DNA, plasmid DNA, mRNA, and anti-sense RNA, any of which can be single stranded or double stranded. The terms “nucleotide sequence” “nucleic acid,” “nucleic acid molecule,” “oligonucleotide” and “polynucleotide” are also used interchangeably herein to refer to a heteropolymer of nucleotides. Nucleic acid molecules and/or nucleotide sequences provided herein are presented herein in the 5′ to 3′ direction, from left to right and are represented using the standard code for representing the nucleotide characters as set forth in the U.S. sequence rules, 37 CFR §§ 1.821-1.825 and the World Intellectual Property Organization (WIPO) Standard ST.25. A “5′ region” as used herein can mean the region of a polynucleotide that is nearest the 5′ end. Thus, for example, an element in the 5′ region of a polynucleotide can be located anywhere from the first nucleotide located at the 5′ end of the polynucleotide to the nucleotide located halfway through the polynucleotide. A “3′ region” as used herein can mean the region of a polynucleotide that is nearest the 3′ end. Thus, for example, an element in the 3′ region of a polynucleotide can be located anywhere from the first nucleotide located at the 3′ end of the polynucleotide to the nucleotide located halfway through the polynucleotide.

[0052] As used herein, the term “gene” refers to a nucleic acid molecule capable of being used to produce mRNA, antisense RNA, miRNA, anti-microRNA antisense oligodeoxyribonucleotide (AMO) and the like. Genes may or may not be capable of being used to produce a functional protein or gene product. Genes can include both coding and non-coding regions (e.g., introns, regulatory elements, promoters, enhancers, termination sequences and/or 5′ and 3′ untranslated regions). A gene may be “isolated” by which is meant a nucleic acid that is substantially or essentially free from components normally found in association with the nucleic acid in its natural state. Such components include other cellular material, culture medium from recombinant production, and/or various chemicals used in chemically synthesizing the nucleic acid.

[0053] The terms “complementary” or “complementarity,” as used herein, refer to the natural binding of polynucleotides under permissive salt and temperature conditions by base-pairing. For example, the sequence “A-G-T” (5′ to 3′) binds to the complementary sequence “T-C-A” (3′ to 5′). Complementarity between two single-stranded molecules may be “partial,” in which only some of the nucleotides bind, or it may be complete when total complementarity exists between the single stranded molecules. The degree of complementarity between nucleic acid strands has significant effects on the efficiency and strength of hybridization between nucleic acid strands.

[0054] “Complement” as used herein can mean 100% complementarity or identity with the comparator nucleotide sequence or it can mean less than 100% complementarity (e.g., about 70%, 71%, 72%, 73%, 74%, 75%, 76%, 77%, 78%, 79%, 80%, 81%, 82%, 83%, 84%, 85%, 86%, 87%, 88%, 89%, 90%, 91%, 92%, 93%, 94%, 95%, 96%, 97%, 98%, 99%, and the like, complementarity).

[0055] As used herein, “a corresponding wild type guide” refers to a wild type guide that corresponds to a synthetic guide of the present invention (i.e., the synthetic nucleic acid construct). That is, a synthetic guide is based on a corresponding wild type guide but the synthetic guide differs from the corresponding wild type guide by the mutations that are inserted in the stem and nexus hairpin regions of the synthetic guide as described herein. Further, a synthetic guide also corresponds to native crRNA and tracrRNA sequences linked artificially at the 3′ end of the crRNA and the 5′ end of the tracrRNA without any modifications to the stem or nexus regions of the native crRNA and tracrRNA sequences.

[0056] A “portion” or “fragment” of a nucleotide sequence of the invention will be understood to mean a nucleotide sequence of reduced length relative (e.g., reduced by 1, 2, 3, 4, 5, 6, 7, 8, 9, 10, 11, 12, 13, 14, 15, 16, 17, 18, 19, 20 or more nucleotides) to a reference nucleic acid or nucleotide sequence and comprising, consisting essentially of and/or consisting of a nucleotide sequence of contiguous nucleotides identical or almost identical (e.g., 70%, 71%, 72%, 73%, 74%, 75%, 76%, 77%, 78%, 79%, 80%, 81%, 82%, 83%, 84%, 85%, 86%, 87%, 88%, 89%, 90%, 91%, 92%, 93%, 94%, 95%, 96%, 97%, 98%, 99% identical) to the reference nucleic acid or nucleotide sequence. Such a nucleic acid fragment or portion according to the invention may be, where appropriate, included in a larger polynucleotide of which it is a constituent.

[0057] Different nucleic acids or proteins having homology are referred to herein as “homologues.” The term homologue includes homologous sequences from the same and other species and orthologous sequences from the same and other species. “Homology” refers to the level of similarity between two or more nucleic acid and/or amino acid sequences in terms of percent of positional identity (i.e., sequence similarity or identity). Homology also refers to the concept of similar functional properties among different nucleic acids or proteins. Thus, the compositions and methods of the invention further comprise homologues to the nucleotide sequences and polypeptide sequences of this invention. “Orthologous,” as used herein, refers to homologous nucleotide sequences and/or amino acid sequences in different species that arose from a common ancestral gene during speciation. A homologue of a nucleotide sequence of this invention has a substantial sequence identity (e.g., at least about 70%, 71%, 72%, 73%, 74%, 75%, 76%, 77%, 78%, 79%, 80%, 81%, 82%, 83%, 84%, 85%, 86%, 87%, 88%, 89%, 90%, 91%, 92%, 93%, 94%, 95%, 96%, 97%, 98%, 99%, and/or 100%) to said nucleotide sequence of the invention.

[0058] As used herein “sequence identity” refers to the extent to which two optimally aligned polynucleotide or peptide sequences are invariant throughout a window of alignment of components, e.g., nucleotides or amino acids. “Identity” can be readily calculated by known methods including, but not limited to, those described in: Computational Molecular Biology (Lesk, A. M., ed.) Oxford University Press, New York (1988); Biocomputing: Informatics and Genome Projects (Smith, D. W., ed.) Academic Press, New York (1993); Computer Analysis of Sequence Data, Part I (Griffin, A. M., and Griffin, H. G., eds.) Humana Press, New Jersey (1994); Sequence Analysis in Molecular Biology (von Heinje, G., ed.) Academic Press (1987); and Sequence Analysis Primer (Gribskov, M. and Devereux, J., eds.) Stockton Press, New York (1991).

[0059] As used herein, the term “percent sequence identity” or “percent identity” refers to the percentage of identical nucleotides in a linear polynucleotide sequence of a reference (“query”) polynucleotide molecule (or its complementary strand) as compared to a test (“subject”) polynucleotide molecule (or its complementary strand) when the two sequences are optimally aligned. In some embodiments, “percent identity” can refer to the percentage of identical amino acids in an amino acid sequence.

[0060] As used herein, the phrase “substantially identical,” or “substantial identity” in the context of two nucleic acid molecules, nucleotide sequences or protein sequences, refers to two or more sequences or subsequences that have at least about 70%, 71%, 72%, 73%, 74%, 75%, 76%, 77%, 78%, 79%, 80%, 81%, 82%, 83%, 84%, 85%, 86%, 87%, 88%, 89%, 90%, 91%, 92%, 93%, 94%, 95%, 96%, 97%, 98%, 99%, and/or 100% nucleotide or amino acid residue identity, when compared and aligned for maximum correspondence, as measured using one of the following sequence comparison algorithms or by visual inspection. In some embodiments of the invention, the substantial identity exists over a region of consecutive nucleotides of a nucleotide sequence of the invention that is about 16 nucleotides to about 30 nucleotides, about 18 nucleotides to about 25 nucleotides, about 30 nucleotides to about 40 nucleotides, about 50 nucleotides to about 60 nucleotides, about 70 nucleotides to about 80 nucleotides, about 90 nucleotides to about 100 nucleotides, or more nucleotides in length, and any range therein, up to the full length of the sequence. In some embodiments, the nucleotide sequences can be substantially identical over at least about 22 nucleotides. In some embodiments, the nucleotide sequences can be substantially identical over at least about 20 nucleotides. In some embodiments, a substantially identical nucleotide or protein sequence performs substantially the same function as the nucleotide or protein sequence to which it is substantially identical.

[0061] For sequence comparison, typically one sequence acts as a reference sequence to which test sequences are compared. When using a sequence comparison algorithm, test and reference.sequences are entered into a computer, subsequence coordinates are designated if necessary, and sequence algorithm program parameters are designated. The sequence comparison algorithm then calculates the percent sequence identity for the test sequence(s) relative to the reference sequence, based on the designated program parameters.

[0062] Optimal alignment of sequences for aligning a comparison window are well known to those skilled in the art and may be conducted by tools such as the local homology algorithm of Smith and Waterman, the homology alignment algorithm of Needleman and Wunsch, the search for similarity method of Pearson and Lipman, and optionally by computerized implementations of these algorithms such as GAP, BESTFIT, FASTA, and TFASTA available as part of the GCG® Wisconsin Package® (Accelrys Inc., San Diego, Calif.). An “identity fraction” for aligned segments of a test sequence and a reference sequence is the number of identical components which are shared by the two aligned sequences divided by the total number of components in the reference sequence segment, i.e., the entire reference sequence or a smaller defined part of the reference sequence. Percent sequence identity is represented as the identity fraction multiplied by 100. The comparison of one or more polynucleotide sequences may be to a full-length polynucleotide sequence or a portion thereof, or to a longer polynucleotide sequence. For purposes of this invention “percent identity” may also be determined using BLASTX version 2.0 for translated nucleotide sequences and BLASTN version 2.0 for polynucleotide sequences.

[0063] Two nucleotide sequences may also be considered substantially complementary when the two sequences hybridize to each other under stringent conditions. In some representative embodiments, two nucleotide sequences considered to be substantially complementary hybridize to each other under highly stringent conditions.

[0064] “Stringent hybridization conditions” and “stringent hybridization wash conditions” in the context of nucleic acid hybridization experiments such as Southern and Northern hybridizations are sequence dependent, and are different under different environmental parameters. An extensive guide to the hybridization of nucleic acids is found in Tijssen Laboratory Techniques in Biochemistry and Molecular Biology-Hybridization with Nucleic Acid Probes part I chapter 2 “Overview of principles of hybridization and the strategy of nucleic acid probe assays” Elsevier, New York (1993). Generally, highly stringent hybridization and wash conditions are selected to be about 5° C. lower than the thermal melting point (Tₘ) for the specific sequence at a defined ionic strength and pH.

[0065] The Tₘ is the temperature (under defined ionic strength and pH) at which 50% of the target sequence hybridizes to a perfectly matched probe. Very stringent conditions are selected to be equal to the Tₘ for a particular probe. An example of stringent hybridization conditions for hybridization of complementary nucleotide sequences which have more than 100 complementary residues on a filter in a Southern or northern blot is 50% formamide with 1 mg of heparin at 42° C., with the hybridization being carried out overnight. An example of highly stringent wash conditions is 0.1 5M NaCl at 72° C. for about 15 minutes. An example of stringent wash conditions is a 0.2×SSC wash at 65° C. for 15 minutes (see, Sambrook, infra, for a description of SSC buffer). Often, a high stringency wash is preceded by a low stringency wash to remove background probe signal. An example of a medium stringency wash for a duplex of, e.g., more than 100 nucleotides, is 1×SSC at 45° C. for 15 minutes. An example of a low stringency wash for a duplex of, e.g., more than 100 nucleotides, is 4-6×SSC at 40° C. for 15 minutes. For short probes (e.g., about 10 to 50 nucleotides), stringent conditions typically involve salt concentrations of less than about 1.0 M Na ion, typically about 0.01 to 1.0 M Na ion concentration (or other salts) at pH 7.0 to 8.3, and the temperature is typically at least about 30° C. Stringent conditions can also be achieved with the addition of destabilizing agents such as formamide. In general, a signal to noise ratio of 2× (or higher) than that observed for an unrelated probe in the particular hybridization assay indicates detection of a specific hybridization. Nucleotide sequences that do not hybridize to each other under stringent conditions are still substantially identical if the proteins that they encode are substantially identical. This can occur, for example, when a copy of a nucleotide sequence is created using the maximum codon degeneracy permitted by the genetic code.

[0066] The following are examples of sets of hybridization/wash conditions that may be used to clone homologous nucleotide sequences that are substantially identical to reference nucleotide sequences of the invention. In one embodiment, a reference nucleotide sequence hybridizes to the “test” nucleotide sequence in 7% sodium dodecyl sulfate (SDS), 0.5 M NaPO₄, 1 mM EDTA at 50° C. with washing in 2×SSC, 0.1% SDS at 50° C. In another embodiment, the reference nucleotide sequence hybridizes to the “test” nucleotide sequence in 7% sodium dodecyl sulfate (SDS), 0.5 M NaPO₄, 1 mM EDTA at 50° C. with washing in 1×SSC, 0.1% SDS at 50° C. or in 7% sodium dodecyl sulfate (SDS), 0.5 M NaPO₄, 1 mM EDTA at 50° C. with washing in 0.5×SSC, 0.1% SDS at 50° C. In still further embodiments, the reference nucleotide sequence hybridizes to the “test” nucleotide sequence in 7% sodium dodecyl sulfate (SDS), 0.5 M NaPO₄, 1 mM EDTA at 50° C. with washing in 0.1×SSC, 0.1% SDS at 50° C., or in 7% sodium dodecyl sulfate (SDS), 0.5 M NaPO₄, 1 mM EDTA at 50° C. with washing in 0.1×SSC, 0.1% SDS at 65° C.

[0067] Any nucleotide sequence and/or recombinant nucleic acid molecule of this invention can be codon optimized for expression in any organism of interest. Codon optimization is well known in the art and involves modification of a nucleotide sequence for codon usage bias using species specific codon usage tables. The codon usage tables are generated based on a sequence analysis of the most highly expressed genes for the organism/species of interest. When the nucleotide sequences are to be expressed in the nucleus, the codon usage tables are generated based on a sequence analysis of highly expressed nuclear genes for the species of interest. The modifications of the nucleotide sequences are determined by comparing the species specific codon usage table with the codons present in the native polynucleotide sequences. As is understood in the art, codon optimization of a nucleotide sequence results in a nucleotide sequence having less than 100% identity (e.g., 70%, 71%, 72%, 73%, 74%, 75%, 7%, 77%, 78%, 79%, 81%, 82%, 83%, 84%, 85%, 86%, 87%, 88%, 89%, 90%, 91%, 92%, 93%, 94%, 95%, 96%, 97%, 98%, 99%, and the like) to the native nucleotide sequence but which still encodes a polypeptide having the same function as that encoded by the original, native nucleotide sequence. Thus, in some embodiments of the invention, the synthetic nucleic acid constructs, expression cassettes, and/or vectors of the invention may be codon optimized for expression in the particular plant species of interest. In some embodiments, the codon optimized synthetic nucleic acid constructs, expression cassettes, and/or vectors have about 70% to about 99% identity to the synthetic nucleic acid constructs, expression cassettes, and/or vectors of the invention.

[0068] In any of the embodiments described herein, a synthetic nucleic acid construct of the invention may be operatively associated with a variety of promoters and other regulatory elements for expression in an organism of interest and/or a cell of an organism of interest. Thus, in some embodiments, a synthetic nucleic acid construct of this invention may further comprise one or more promoters operably linked to one or more nucleotide sequences.

[0069] By “operably linked” or “operably associated” as used herein, it is meant that the indicated elements are functionally related to each other, and are also generally physically related. Thus, the term “operably linked” or “operably associated” as used herein, refers to nucleotide sequences on a single nucleic acid molecule that are functionally associated. Thus, a first nucleotide sequence that is operably linked to a second nucleotide sequence means a situation when the first nucleotide sequence is placed in a functional relationship with the second nucleotide sequence. For instance, a promoter is operably associated with a nucleotide sequence if the promoter effects the transcription or expression of said nucleotide sequence. Those skilled in the art will appreciate that the control sequences (e.g., promoter) need not be contiguous with the nucleotide sequence to which it is operably associated, as long as the control sequences function to direct the expression thereof. Thus, for example, intervening untranslated, yet transcribed, sequences can be present between a promoter and a nucleotide sequence, and the promoter can still be considered “operably linked” to the nucleotide sequence.

[0070] A “promoter” is a nucleotide sequence that controls or regulates the transcription of a nucleotide sequence (i.e., a coding sequence) that is operably associated with the promoter. The coding sequence may encode a polypeptide and/or a functional RNA. Typically, a “promoter” refers to a nucleotide sequence that contains a binding site for RNA polymerase II and directs the initiation of transcription. In general, promoters are found 5′, or upstream, relative to the start of the coding region of the corresponding coding sequence. The promoter region may comprise other elements that act as regulators of gene expression. These include a TATA box consensus sequence, and often a CAAT box consensus sequence (Breathnach and Chambon, (1981) Annu. Rev. Biochem. 50:349). In plants, the CAAT box may be substituted by the AGGA box (Messing et al., (1983) in Genetic Engineering of Plants, T. Kosuge, C. Meredith and A. Hollaender (eds.), Plenum Press, pp. 211-227).

[0071] Promoters can include, for example, constitutive, inducible, temporally regulated, developmentally regulated, chemically regulated, tissue-preferred and/or tissue-specific promoters for use in the preparation of recombinant nucleic acid molecules, i.e., “synthetic nucleic acid constructs” or “protein-RNA complex.” These various types of promoters are known in the art.

[0072] The choice of promoter may vary depending on the temporal and spatial requirements for expression, and also may vary based on the host cell to be transformed. Promoters for many different organisms are well known in the art. Based on the extensive knowledge present in the art, the appropriate promoter can be selected for the particular host organism of interest. Thus, for example, much is known about promoters upstream of highly constitutively expressed genes in model organisms and such knowledge can be readily accessed and implemented in other systems as appropriate.

[0073] In some embodiments, a synthetic nucleic acid construct of the invention and/or a protein-RNA complex of the invention can be an “expression cassette” or can be comprised within an expression cassette. As used herein, “expression cassette” means a recombinant nucleic acid molecule comprising, for example, a synthetic nucleic acid construct of the invention (e.g., crRNA, tracrRNA), wherein the synthetic nucleic acid construct of the invention is operably associated with at least a control sequence (e.g., a promoter). Thus, some embodiments of the invention provide expression cassettes designed to express, for example, a synthetic nucleic acid construct of the invention.

[0074] An expression cassette comprising a nucleotide sequence of interest (e.g., crRNA, tracrRNA) may be chimeric, meaning that at least one of its components is heterologous with respect to at least one of its other components. An expression cassette may also be one that is naturally occurring but has been obtained in a recombinant form useful for heterologous expression.

[0075] An expression cassette also can optionally include a transcriptional and/or translational termination region (i.e., termination region) that is functional in the selected host cell. A variety of transcriptional terminators are available for use in expression cassettes and are responsible for the termination of transcription beyond the heterologous nucleotide sequence of interest and correct mRNA polyadenylation. The termination region may be native to the transcriptional initiation region, may be native to the operably linked nucleotide sequence of interest, may be native to the host cell, or may be from another source (i.e., foreign or heterologous to the promoter, to the nucleotide sequence of interest, to the host, or any combination thereof).

[0076] An expression cassette of the invention also can include a nucleotide sequence for a selectable marker, which can be used to select a transformed host cell. As used herein, “selectable marker” means a nucleotide sequence that when expressed imparts a distinct phenotype to the host cell expressing the marker and thus allows such transformed cells to be distinguished from those that do not have the marker. Such a nucleotide sequence may encode either a selectable or screenable marker, depending on whether the marker confers a trait that can be selected for by chemical means, such as by using a selective agent (e.g., an antibiotic and the like), or on whether the marker is simply a trait that one can identify through observation or testing, such as by screening (e.g., fluorescence). Of course, many examples of suitable selectable markers are known in the art and can be used in the expression cassettes described herein.

[0077] In addition to expression cassettes, the nucleic acid molecules and nucleotide sequences described herein can be used in connection with vectors. The term “vector” refers to a composition for transferring, delivering or introducing a nucleic acid (or nucleic acids) into a cell. A vector comprises a nucleic acid molecule comprising the nucleotide sequence(s) to be transferred, delivered or introduced. Vectors for use in transformation of host organisms are well known in the art. Non-limiting examples of general classes of vectors include but are not limited to a viral vector, a plasmid vector, a phage vector, a phagemid vector, a cosmid vector, a fosmid vector, a bacteriophage, an artificial chromosome, or an Agrobacterium binary vector in double or single stranded linear or circular form which may or may not be self transmissible or mobilizable. A vector as defined herein can transform prokaryotic or eukaryotic host either by integration into the cellular genome or exist extrachromosomally (e.g. autonomous replicating plasmid with an origin of replication). Additionally included are shuttle vectors by which is meant a DNA vehicle capable, naturally or by design, of replication in two different host organisms, which may be selected from actinomycetes and related species, bacteria and eukaryotic (e.g. higher plant, mammalian, yeast or fungal cells). In some embodiments, the nucleic acid in the vector is under the control of, and operably linked to, an appropriate promoter or other regulatory elements for transcription in a host cell. The vector may be a bi-functional expression vector which functions in multiple hosts. In the case of genomic DNA, this may contain its own promoter or other regulatory elements and in the case of cDNA this may be under the control of an appropriate promoter or other regulatory elements for expression in the host cell. Accordingly, a synthetic nucleic acid construct of this invention, a protein-RNA complex of the invention, and/or expression cassettes can be comprised in vectors as described herein and as known in the art.

[0078] As used herein, “contact”, contacting”, “contacted,” and grammatical variations thereof, refers to placing the components of a desired reaction together under conditions suitable for carrying out the desired reaction (e.g., transcriptional control, genome editing, nicking, cleavage, and/or amplifying nucleic acids).

[0079] “Introducing,” “introduce,” “introduced” (and grammatical variations thereof) in the context of a polynucleotide of interest means presenting a nucleotide sequence of interest (e.g., a synthetic nucleic acid construct, a protein-RNA complex, a crRNA, tracrRNA, and/or Cas9 polynucleotide) to the host organism or cell of said organism (e.g., host cell) in such a manner that the nucleotide sequence gains access to the interior of a cell. Where more than one nucleotide sequence is to be introduced these nucleotide sequences can be assembled as part of a single polynucleotide or nucleic acid construct, or as separate polynucleotide or nucleic acid constructs, and can be located on the same or different expression constructs or transformation vectors. Accordingly, these polynucleotides can be introduced into a host cell in a single transformation event, in separate transformation events, or, for example, they can be incorporated into an organism by conventional breeding protocols.

[0080] The term “transformation” as used herein refers to the introduction of a heterologous nucleic acid into a cell. Transformation of a cell may be stable or transient. Thus, in some embodiments, a host cell or host organism is stably transformed with a nucleic acid molecule of the invention. In other embodiments, a host cell or host organism is transiently transformed with a recombinant nucleic acid molecule of the invention.

[0081] “Transient transformation” in the context of a polynucleotide means that a polynucleotide is introduced into the cell and does not integrate into the genome of the cell.

[0082] By “stably introducing” or “stably introduced” in the context of a polynucleotide introduced into a cell is intended that the introduced polynucleotide is stably incorporated into the genome of the cell, and thus the cell is stably transformed with the polynucleotide.

[0083] “Stable transformation” or “stably transformed” as used herein means that a nucleic acid molecule is introduced into a cell and integrates into the genome of the cell. As such, the integrated nucleic acid molecule is capable of being inherited by the progeny thereof, more particularly, by the progeny of multiple successive generations. “Genome” as used herein also includes the nuclear and the plastid genome, and therefore includes integration of the nucleic acid into, for example, the chloroplast or mitochondrial genome. Stable transformation as used herein can also refer to a transgene that is maintained extrachromasomally, for example, as a minichromosome or a plasmid.

[0084] Transient transformation may be detected by, for example, an enzyme-linked immunosorbent assay (ELISA) or Western blot, which can detect the presence of a peptide or polypeptide encoded by one or more transgene introduced into an organism. Stable transformation of a cell can be detected by, for example, a Southern blot hybridization assay of genomic DNA of the cell with nucleic acid sequences which specifically hybridize with a nucleotide sequence of a transgene introduced into an organism (e.g., a plant). Stable transformation of a cell can be detected by, for example, a Northern blot hybridization assay of RNA of the cell with nucleic acid sequences which specifically hybridize with a nucleotide sequence of a transgene introduced into a host organism. Stable transformation of a cell can also be detected by, e.g., a polymerase chain reaction (PCR) or other amplification reactions as are well known in the art, employing specific primer sequences that hybridize with target sequence(s) of a transgene, resulting in amplification of the transgene sequence, which can be detected according to standard methods Transformation can also be detected by direct sequencing and/or hybridization protocols well known in the art.

[0085] Accordingly, in some embodiments, the nucleotide sequences, constructs, expression cassettes can be expressed transiently and/or they can be stably incorporated into the genome of the host organism. Thus, in some embodiments, a Cas9 polypeptide may be introduced into a cell with a RNA guide and as such no DNA is introduced or maintained in the cell.

[0086] A synthetic nucleic acid construct/polynucleotide of the invention can be introduced into a cell by any method known to those of skill in the art. In some embodiments of the invention, transformation of a cell comprises nuclear transformation. In other embodiments, transformation of a cell comprises plastid transformation (e.g., chloroplast transformation). In still further embodiments, the recombinant nucleic acid molecule/polynucleotide of the invention can be introduced into a cell via conventional breeding techniques.

[0087] Procedures for transforming both eukaryotic and prokaryotic organisms are well known and routine in the art and are described throughout the literature (See, for example, Jiang et al. 2013. Nat. Biotechnol. 31:233-239; Ran et al. Nature Protocols 8:2281-2308 (2013))

[0088] A nucleotide sequence therefore can be introduced into a host organism or its cell in any number of ways that are well known in the art. The methods of the invention do not depend on a particular method for introducing one or more nucleotide sequences into the organism, only that they gain access to the interior of at least one cell of the organism. Where more than one nucleotide sequence is to be introduced, they can be assembled as part of a single nucleic acid construct, or as separate nucleic acid constructs, and can be located on the same or different nucleic acid constructs. Accordingly, the nucleotide sequences can be introduced into the cell of interest in a single transformation event, or in separate transformation events, or, alternatively, where relevant, a nucleotide sequence can be incorporated into a plant, for example, as part of a breeding protocol.

[0089] The present invention is directed to the making and use of synthetic CRISPR-Cas nucleic acid constructs for DNA editing, site-specific cleavage or nicking of a target DNA, and/or transcriptional control of a target DNA.

[0090] The present inventors have surprisingly discovered that mutations in the stem (e.g., lower stem, and optionally, upper stem and kink,) and nexus hairpin regions of the crRNA-tracrRNA duplexes can produce single guides, which when complexed with a Cas9 polypeptide (endogenous or exogenous), can modify the activity of the Cas9 polypeptide as compared to a corresponding WT single guide. Thus, in some embodiments, a mutated single guide (e.g., a synthetic nucleic acid construct)/Cas9 polypeptide complex binds to a target DNA and exhibits reduced cleaving of the target DNA by the Cas9 polypeptide of the mutated guide/Cas9 complex as compared to cleaving of the target DNA by the Cas9 polypeptide when it is complexed with the corresponding WT guide. In some embodiments, a mutated single guide/Cas9 complex that binds to a target DNA and exhibits reduced cleaving of the target DNA may be useful for, for example, transcriptional control of target DNA. In some embodiments, a mutated single guide (e.g., a synthetic nucleic acid construct)/Cas9 polypeptide complex binds to a target DNA and exhibits increased cleaving of the target DNA by the Cas9 polypeptide of the mutated guide/Cas9 complex as compared to cleaving of the target DNA by the Cas9 polypeptide when complexed with the corresponding WT guide. In some embodiments, a mutated single guide/Cas9 complex that binds to a target DNA and exhibits increased cleaving of the target DNA may be useful for, for example, DNA editing, DNA cleavage, site specific dsDNA cleavage, and/or site specific dsDNA nicking.

[0091] In one aspect of the invention a synthetic nucleic acid construct is provided, comprising: (a) a crRNA comprising a 3′ region and a 5′ region, wherein the 3′ region comprises at least about 10 consecutive nucleotides of a CRISPR repeat, and/or a functional fragment of the CRISPR repeat, and the 5′ region comprises at least about 20 consecutive nucleotides of a spacer sequence located immediately upstream of the repeat; (b) a tracrRNA comprising a 5′ and a 3′ region, wherein at least a portion of the 5′ region of the tracrRNA is complementary to the 3′ region (i.e., CRISPR repeat) of the crRNA, wherein, when the 5′ region of the tracrRNA that is complementary to the 3′ region of the crRNA hybridizes to the 3′ region of the crRNA, the synthetic nucleic acid construct forms secondary structures from 5′ to 3′ of: (i) a stem, the stem comprising a duplex between the 5′ end of the tracrRNA and the repeat of the crRNA, and optionally, the stem further comprising a kink or a bulge; (ii) a nexus hairpin; (iii) at least one terminal hairpin; and (c) optionally, a linker that when present links the 3′end of the crRNA to the 5′ end of the tracrRNA (i.e., linking the 3′ end and 5′ end of the stem), wherein the construct comprises an insertion, substitution, and/or deletion of about one to about five nucleotides or base pairs (e.g., 1, 2, 3, 4, 5 nucleotides or base pairs) in the nexus hairpin as compared to a wild type Type II crRNA:tracrRNA duplex; and/or an insertion, substitution and/or deletion of about one to about nine nucleotides and/or base pairs (e.g., 1, 2, 3, 4, 5, 6, 7, 8, 9 nucleotides or base pairs) in the stem as compared to a wild type Type II crRNA:tracrRNA duplex.

[0092] In a further aspect, the present invention provides a protein-RNA complex, comprising: (a) a Cas9 polypeptide; and (b) a synthetic nucleic acid construct comprising: (a) a crRNA comprising a 3′ region and a 5′ region, wherein the 3′ region comprises at least about 10 consecutive nucleotides of a CRISPR repeat, and/or a functional fragment of the CRISPR repeat, and the 5′ region comprises at least about 20 consecutive nucleotides of a spacer sequence located immediately upstream of the repeat; (b) a tracrRNA comprising a 5′ and a 3′ region, wherein at least a portion of the 5′ region of the tracrRNA is complementary to the 3′ region (i.e., CRISPR repeat) of the crRNA, wherein, when the 5′ region of the tracrRNA that is complementary to the 3′ region of the crRNA hybridizes to the 3′ region of the crRNA, the synthetic nucleic acid construct forms secondary structures from 5′ to 3′ of: (i) a stem, the stem comprising a duplex between the 5′ end of the tracrRNA and the repeat of the crRNA, and optionally, the stem further comprising a kink or a bulge; (ii) a nexus hairpin; (iii) at least one terminal hairpin; and (c) optionally, a linker that when present links the 3′end of the crRNA to the 5′ end of the tracrRNA (i.e., linking the 3′ end and 5′ end of the stem), wherein the construct comprises an insertion, substitution, and/or deletion of about one to about five nucleotides or base pairs (e.g., 1, 2, 3, 4, 5 nucleotides or base pairs) in the nexus hairpin as compared to a wild type Type II crRNA:tracrRNA duplex; and/or an insertion, substitution and/or deletion of about one to about nine nucleotides and/or base pairs (e.g., 1, 2, 3, 4, 5, 6, 7, 8, 9 nucleotides or base pairs) in the stem as compared to a wild type Type II crRNA:tracrRNA duplex.

[0093] In some embodiments of the present invention, at least one terminal hairpin comprises at least two terminal hairpins, 1 to 2 terminal hairpins, 1 to 3 terminal hairpins, 1 terminal hairpin, 2 terminal hairpins, or 3 terminal hairpins.

[0094] In some embodiments, a linker between the crRNA and the tracrRNA (at the stem region) is present. In some embodiments, a linker may comprise at least 3 nucleotides (e.g., 3, 4, 5, 6 nucleotides). In some embodiments, a linker may comprise about 3 to about 6 nucleotides (e.g., 3, 4, 5, or 6 nucleotides) or about 3 to about 5 nucleotides (e.g., 3, 4, or 5 nucleotides).

[0095] In some embodiments of the present invention, a modification (e.g., a substitution, deletion or insertion) of one or both nucleotides of a base pair constitutes a single modification (i.e., counted as one).

[0096] In some embodiments, an insertion, substitution, and/or deletion in the nexus hairpin can comprise an insertion, substitution, and/or deletion of about 1 to 2, 1 to 3, 1 to 4, 1 to 5, 2 to 3, 2 to 4, 2 to 5, 3 to 4, 3 to 5, 4 to 5 nucleotides and/or base pairs, or any range or value therein.

[0097] In some embodiments, an insertion, substitution, and/or deletion in the stem (e.g., lower stem, and/or lower stem, kink and upper stem) can comprise an insertion, substitution, and/or deletion of about 1 to 2, 1 to 3, 1 to 4, 1 to 5, 1 to 6, 1 to 7, 1 to 8, 2 to 3, 2 to 4, 2 to 5, 2 to 6, 2 to 7, 2 to 8, 2 to 9, 3 to 4, 3 to 5, 3 to 6, 3 to 7, 3 to 8, 3 to 9, 4 to 5, 4 to 6, 4 to 7, 4 to 8, 4 to 9, 5 to 6, 5 to 7, 5 to 8, 5 to 9, 6 to 7, 6 to 8, 6 to 9, 7 to 8, 7 to 9, 8 to 9 nucleotides and/or base pairs, or any range or value therein.

[0098] In some embodiments, an insertion, substitution and/or deletion may increase the GC content of the synthetic nucleic acid construct as compared to a wild type Type II crRNA:tracrRNA duplex. In some embodiments, 1, a substitution may comprise replacing a complementary base pair with a pair of non-complementary (unmatched) nucleotides, thereby introducing a bulge. In some embodiments, a substitution may comprise replacing a complementary base pair with a different complementary base pair, thereby maintaining a duplex. In some embodiments, a substitution may comprise replacing a pair of non-complementary nucleotides with a different pair of non-complementary nucleotides, thereby maintaining a bulge. In some embodiments, a substitution may comprise replacing a pair of non-complementary nucleotides with a pair of complementary nucleotides, thereby modifying a bulge.

[0099] In some embodiments, a substitution may comprise a pyrimidine nucleotide replaced by another pyrimidine nucleotide, a purine nucleotide replaced by a purine nucleotide, a purine nucleotide replaced by a pyrimidine nucleotide, and/or a pyrimidine nucleotide replaced by a purine nucleotide.

[0100] In some embodiments, an insertion may increase the distance between the stem and the nexus. In some embodiments, a substitution and/or insertion may produce a bulge in the stem. In some embodiments, when a kink is present in the stem region, a substitution and/or insertion may increase or decrease the size of the kink (e.g., size may be increase when additional unpaired bases are generated, and size may be decreased when additional paired bases are generated). In some embodiments, a deletion may shorten or eliminate at least a portion of a stem. In some embodiments, a deletion may shorten the nexus hairpin region. In some embodiments, an insertion may lengthen the nexus hairpin region.

[0101] As is well known in the art, Cas9 polypeptides are multifunctional proteins that bind DNA (e.g., target DNA), RNA (guide RNA) and specific nucleotide sequences called protospacer adjacent motifs (PAM), in addition to comprising nuclease/nickase activity (RuvC and HNH motifs) that allows them to cut each strand of a double stranded nucleic acid. In some embodiments of the invention, a CRISPR Cas9 polypeptide may be a Cas9 polypeptide from Lactobacillus spp., Bifidobacterium spp., Kandleria spp., Leuconostoc spp., Oenococcus spp., Pediococcus spp., Streptococcus spp., Weissella spp., and/or Olsenella spp. As noted above, Cas9 polypeptides can recognize and bind to the PAM sequences that are located on the target DNA. Cas9 polypeptides exhibit specificity for the particular PAM sequence that they recognize and bind to.

[0102] In some embodiments, a Cas9 polypeptide can be encoded by a nucleotide sequence of any of SEQ ID NOs:294-388, may be a polypeptide comprising the amino acid sequence of SEQ ID NOs:194-293, or encoded by a nucleotide sequence encoding a polypeptide comprising the amino acid sequence of SEQ ID NOs:194-293.

[0103] The structure of Cas9 polypeptides is described in the art and understood to comprise a nuclease lobe (NUC) and a recognition lobe (REC), with the NUC lobe interacting with the PAM and target DNA, while the REC lobe interacts with and binds to the sgRNA (crRNA-tracrRNA) (see, Barrangou, R. Science 344:707-708 (2104), generally and figure presented therein. It is between the groove located between the two lobes that the sgRNA-target DNA heteroduplex is formed. Id. Further, as noted above, the HNH and RuvC motifs of a Cas9 polypeptide have been characterized (Sapranauskas et al. Nucleic Acids Res. 39:9275-9282 (2011)). Additional details regarding the structure of Cas9 polypeptides and their interaction with tracrRNA and crRNA (sgRNAs) can be found in Nishimasu et al. (Cell 156(5):935-949 (2014)). Here, they provide the crystal structure of Cas9 in complex with guide RNA and target RNA as well as schematics of the sgRNA:target DNA complex and the structure of the Cas9 polypeptide. Thus, the structure of the Cas9 polypeptide is well characterized with the various functions of the protein associated with defined structures within the polypeptide.

[0104] In some embodiments, a crRNA of this invention, comprising a 3′ region and a 5′ region, can further comprise a CRISPR repeat located upstream of the spacer sequence, wherein the CRISPR repeat comprises, consists essentially, or consists of at least about 10 consecutive nucleotides (e.g., about 10, 11, 12, 13, 14, 15, 16, 17, 18, 19, 20, 21, 22, 23, 24, 25, 26, 27, 28, 29, 30 or more nucleotides) of CRISPR repeat from a Type II CRISPR-Cas system, for example, from Lactobacillus spp., Bifidobacterium spp., Kandleria spp., Leuconostoc spp., Oenococcus spp., Pediococcus spp., Streptococcus spp., Weissella spp., and/or Olsenella spp. (e.g., SEQ ID NOs:1-98, or a functional fragment thereof, which are modified to produce a modified synthetic guide as described herein). Therefore, in representative embodiments, a crRNA can comprise, consist essentially of, or consist of (from 5′ to 3′) a spacer sequence—a CRISPR repeat, or a CRISPR repeat—a spacer sequence—a CRISPR repeat. As used herein, a “functional fragment” of a crRNA means a portion of said crRNA which binds to the corresponding tracrRNA and/or a portion of which is recognized and bound to a corresponding Cas9 polypeptide. FIG. 5 shows example CRISPR repeat sequence alignments with conserved and consensus nucleotides specified at the bottom of each family, with Sth3 (top), Sth1 (middle) and Lb (bottom) families, thereby providing structural references for crRNA fragments for use with this invention. FIGS. 6-9 provide additional alignments of example CRISPR repeat and tracrRNA sequence for Lactobacillus and Streptococcus species/strains useful with this invention. Additional example repeat sequences and tracrRNA sequence from various organisms are provided in FIG. 10.

[0105] A “spacer sequence” as used herein means a sequence that is upstream (5′) of a repeat in a crRNA. Alternatively, when the crRNA comprises two repeats (i.e., a first and a second repeat) the spacer sequence is located between the two repeats (i.e., the spacer sequence is located 3′ of the first repeat and 5′ of the second repeat). Generally, the spacer sequence comprises a polynucleotide sequence that is complementary to a target DNA and/or an invasive foreign (e.g., heterologous) DNA (e.g., a nucleotide sequence from a bacteriophage, plasmid or chromosome that is foreign to, for example, a bacterium or an archaeon). The spacer sequence can be at least 70% complementary (e.g., 70%, 71%, 72%, 73%, 74%, 75%, 76%, 77%, 78%, 79%, 80%, 81%, 82%, 83%, 84%, 85%, 86%, 87%, 88%, 89%, 90%, 91%, 92%, 93%, 94%, 95%, 96%, 97%, 98%, 99%, or 100% homologous) to the target DNA. In representative embodiments, the spacer sequence is 100% complementary to the target DNA. In other embodiments, the complementarity of the 3′ region of the spacer sequence to the target or DNA is 100% but is less than 100% in the 5′ region of the spacer. Thus, for example, the first 7, 8, 9, 10, 11, 12, 13, 14, 15, 16, and the like, nucleotides in the 3′ region of a 20 nucleotide spacer sequence (seed sequence) can be 100% complementary the target DNA, while the remaining nucleotides in the 5′ region of the spacer sequence are at least about 70% complementary to the target DNA. In representative embodiments, the first 12 nucleotides of the spacer sequence can be 100% complementary to the target DNA, while the remaining nucleotides in the 5′ region of the spacer sequence be at least about 70% complementary to the target DNA.

[0106] In some embodiments, a repeat for use with this invention can comprise, consist essentially of, or consist of a repeat from Lactobacillus spp., Bifidobacterium spp., Kandleria spp., Leuconostoc spp., Oenococcus spp., Pediococcus spp., Streptococcus spp., Weissella spp., and/or Olsenella spp. In some embodiments, a crRNA repeat from Lactobacillus spp., Bifidobacterium spp., Kandleria spp., Leuconostoc spp., Oenococcus spp., Pediococcus spp., Streptococcus spp., Weissella spp., and/or Olsenella spp. comprises, consists essentially of, or consists of a nucleotide sequence of any of SEQ ID NOs:1-98 or a functional fragment thereof, which may be modified to produce a synthetic repeat for use in a synthetic crRNA or a synthetic crRNA:tracrRNA guide as described herein.

[0107] In some embodiments, the 5′ region of the tracrRNA of the synthetic nucleic acid construct can comprise, consist essentially of, or consist of at least about 20 nucleotides (e.g., 20, 21, 22, 23, 24, 25, 26, 27, 28, 29, 30, 31, 32, 33, 34, 35, 36 or more consecutive nucleotides) complementary to the at least 20 consecutive nucleotides of the 3′ region of the crRNA.

[0108] The 5′ region of the tracrRNA is described herein as complementary to the 3′ region (repeat) of the crRNA. In some embodiments, “complementary” means having at least about 70% or more (e.g., about 70%, 71%, 72%, 73%, 74%, 75%, 76%, 77%, 78%, 79%, 80%, 81%, 82%, 83%, 84%, 85%, 86%, 87%, 88%, 89%, 90%, 91%, 92%, 93%, 94%, 95%, 96%, 97%, 98%, 99%, or 100%) homology to the 3′ repeat of the crRNA. Thus, for example, the 5′ region of a tracrRNA that is complementary to about 20 consecutive nucleotides of a crRNA can have 100% complementarity to about 14 out of 20 consecutive nucleotides of the crRNA repeat. In representative embodiments, the 5′ region of a tracrRNA that is complementary to a 20 consecutive nucleotides of a crRNA can have 100% complementarity to at least 7 consecutive nucleotides (e.g., 7, 8, 9, 10, 11, 12, 13, 14, 15, 16, 17, 18, 19, 20 nucleotides) of the crRNA repeat. Example tracrRNA nucleotide sequences useful with this invention can be a tracrRNA from any Type II CRISPR Cas system including but not limited to SEQ ID NOs:99-193, which may be modified to produce a synthetic tracrRNA or a synthetic crRNA:tracrRNA guide as described herein.

[0109] The present invention further provides expression cassettes and/or vectors comprising or encoding the nucleotide sequences (e.g., a synthetic nucleic acid construct, protein-RNA construct; crRNA, tracrRNA, Cas9) of this invention.

[0110] The present invention additionally provides a cell comprising synthetic nucleic acid constructs and/or protein-RNA complexes of this invention. A cell can be from any organism useful with this invention including, but not limited to, a plant cell, bacteria cell, fungal cell, an animal cell, mammalian cell, insect cell, or archaeon cell. In some embodiments, the cell can be, for example, from Homo sapiens, Drosophila melanogaster, Mus musculus, Rattus norvegicus, Caenorhabditis elegans, Saccharomyces cerevisiae, Zea mays, or Arabidopsis thaliana, and the like.

[0111] In some embodiments, the present invention provides a method of producing a modified Type II crRNA:tracrRNA construct, comprising: (a) inserting, substituting, and/or deleting about one to about five nucleotides or base pairs in the nexus hairpin of a Type II crRNA:tracrRNA; and/or (b) inserting, substituting, and/or deleting about one to about nine nucleotides and/or base pairs in a stem of the Type II crRNA:tracrRNA, wherein the crRNA comprises a 3′ region and a 5′ region, the 3′ region comprising at least about 10 consecutive nucleotides of a CRISPR repeat, and/or a functional fragment of the repeat, and the 5′ region comprises at least about 20 consecutive nucleotides of a spacer sequence located immediately upstream of the repeat, and the tracrRNA comprises a 5′ and a 3′ region, and at least a portion of the 5′ region of the tracrRNA is complementary to the 3′ region (i.e., CRISPR repeat) of the crRNA, further wherein, when the 5′ region of the tracrRNA that is complementary to the 3′ region of the crRNA hybridizes to the 3′ region of the crRNA, the Type II crRNA:tracrRNA forms secondary structures from 5′ to 3′ of: (i) a stem, the stem comprising a duplex between the 5′ end of the tracrRNA and the repeat of the crRNA, and optionally, the stem further comprising a kink or a bulge; (ii) a nexus hairpin; (iii) at least one terminal hairpin; and (c) optionally, a linker that when present links the 3′end of the crRNA to the 5′ end of the tracrRNA (i.e., linking the 3′ end and 5′ end of the stem), thereby producing a modified Type II rRNA:tracrRNAs construct. In some embodiments, the present invention provides a modified Type II rRNA:tracrRNAs construct (e.g., a synthetic nucleic acid construct) produced by the methods of the invention.

[0112] In some embodiments, the present invention provides a method of modifying the activity of a Cas9 polypeptide, comprising complexing the Cas9 polypeptide with a synthetic nucleic acid construct of the invention, thereby modifying the activity of a Cas9 polypeptide as compared to a Cas9 polypeptide complexed with a wild type Type II crRNA:tracrRNA duplex. In some aspects of the present invention, the activity of the Cas9 polypeptide when complexed with the synthetic nucleic acid construct is increased (e.g., increased cleavage/killing) as compared to a Cas9 polypeptide complexed with a wild type Type II crRNA:tracrRNA duplex. In some aspects of the present invention, the activity of the Cas9 polypeptide when complexed with the synthetic nucleic acid construct is decreased (e.g., reduced or no cleavage/killing) as compared to a Cas9 polypeptide complexed with a corresponding wild type Type II crRNA:tracrRNA duplex.

[0113] In some embodiments, the present invention provides a method of controlling transcription of a target DNA, comprising: contacting the target DNA with a synthetic nucleic acid construct of the invention and/or an expression cassette and/or vector comprising the synthetic nucleic acid construct, in the presence of a Cas9 polypeptide, wherein the synthetic nucleic acid construct and Cas9 polypeptide form a complex that binds to the target DNA, thereby controlling the transcription of the target DNA. Thus, in some embodiments, a synthetic guide of the present invention, in the presence of a Cas9 polypeptide, may bind the target DNA but prevents cleavage, thereby controlling the transcription of the target DNA. In some embodiments, the Cas 9 polypeptide is an endogenous Cas9 polypeptide. In some embodiments, a Cas9 polypeptide may be provided with the synthetic guide of the present invention. Thus, in some embodiments, the present invention provides a method of controlling transcription of a target DNA, comprising: contacting the target DNA with a protein-RNA complex of the present invention, and/or an expression cassette and/or a vector comprising a synthetic nucleic acid construct and encoding a Cas9 polypeptide of the protein-RNA complex, wherein the protein RNA complex binds to the target DNA, thereby controlling the transcription of the target DNA.

[0114] “Transcriptional control” as used herein means modulating expression of a target DNA (i.e., activation (increasing) and/or repression (decreasing) expression of the target DNA. Repression of expression can be accomplished by, for example, using a Cas9 polypeptide (endogenous or heterologous) with a synthetic nucleic acid construct of the invention or a protein-RNA complexes of the invention, which bind to the target nucleic acid and interfere with or repress expression of the target nucleic acid.

[0115] In some embodiments, a method for site-specific cleavage of a target DNA is provided, comprising: contacting the target DNA with a synthetic nucleic acid construct of the present invention, and/or an expression cassette and/or a vector comprising a synthetic nucleic acid construct of the invention, in the presence of a Cas9 polypeptide, thereby producing a site specific cleavage of the target DNA in a region defined by complementary binding of the spacer sequence of the crRNA of said synthetic nucleic acid construct to the target DNA.

[0116] In some embodiments, a method for site-specific cleavage of a target DNA is provided, comprising: contacting the target DNA with a protein-RNA complex of the present invention, and/or an expression cassette and/or a vector comprising a synthetic nucleic acid construct of the invention and encoding a Cas9 polypeptide of the protein-RNA complex, thereby producing a site specific cleavage of the target DNA in a region defined by complementary binding of the spacer sequence of the crRNA of the protein-RNA complex to the target DNA.

[0117] In some embodiments, a method of editing a target DNA is provided, comprising: contacting the target DNA with a synthetic nucleic acid construct of the present invention, and/or with an expression cassette and/or a vector comprising the synthetic nucleic acid construct, in the presence of a Cas9 polypeptide, wherein the synthetic nucleic acid construct binds to the target DNA, thereby editing the target DNA.

[0118] In some embodiments, the present invention provides a method of editing a target DNA, comprising: contacting the target DNA with a protein-RNA complex of the present invention, and/or an expression cassette and/or a vector comprising a synthetic nucleic acid construct and encoding a Cas9 polypeptide of the protein-RNA complex, wherein the protein-RNA complex binds to the target DNA, thereby editing the target DNA.

[0119] In some embodiments, contacting a target DNA with a synthetic nucleic acid construct of the present invention and Cas9 polypeptide and/or a protein-RNA complex of the present invention comprises contacting the target DNA with synthetic nucleic acid construct of the present invention and/or a protein-RNA complex encoded or comprised in an expression cassette or vector. Accordingly, in some embodiments, an expression cassette and/or vector can be constructed to produce a synthetic nucleic acid construct of the invention (e.g., mutated tracrRNA-crRNA (sgRNA)) and optionally express a Cas9 polypeptide (e.g., a heterologous/exogenous Cas9). In some embodiments, a Cas9 polypeptide can be provided in combination with an expression cassette or vector comprising or encoding a sgRNA. In some embodiments, no expression cassette or vector is utilized, instead a target DNA can be contacted with a protein-RNA complex of the invention itself.

[0120] In some embodiments of the invention, a method for site-specific nicking of a (+) strand of a double stranded target DNA provided, comprising: contacting the double stranded target DNA with a protein-RNA complex of the present invention, and/or an expression cassette and/or a vector comprising a synthetic nucleic acid construct and encoding a Cas9 polypeptide of the protein-RNA complex, wherein the Cas9 polypeptide, comprises a point mutation in an RuvC active site motif, and the Cas9 polypeptide cleaves the (+) strand of the double stranded DNA, thereby producing a site-specific nick in said double stranded target DNA.

[0121] In some embodiments, the invention provides a method for site-specific nicking of a (−) strand of a double stranded target DNA, comprising: contacting the double stranded target DNA with a protein-RNA complex of the present invention, and/or an expression cassette and/or a vector comprising a synthetic nucleic acid construct and encoding a Cas9 polypeptide of the protein-RNA complex, wherein the Cas9 polypeptide, comprises a point mutation in an HNH active site motif, and the Cas9 polypeptide cleaves the (−) strand of the double stranded DNA, thereby producing a site-specific nick in said double stranded target DNA.

[0122] A Cas9 polypeptide or nuclease useful with this invention can be any Cas9 polypeptide. A Cas9 polypeptide can be from, for example, Lactobacillus spp., Bifidobacterium spp., Kandleria spp., Leuconostoc spp., Oenococcus spp., Pediococcus spp., Streptococcus spp., Weissella spp., and/or Olsenella spp. In some embodiments, a Cas9 polypeptide can comprise, consist essentially of, or consist of an amino acid sequence having at least about 80% (e.g., 80%, 81%, 82%, 83%, 84%, 85%, 86%, 87%, 88%, 89%, 90%, 91%, 92%, 93%, 94%, 95%, 96%, 97%, 98%, 99%, or 100%) identity to a polypeptide comprising the amino acid sequence of SEQ ID NOs:194-293.

[0123] In some embodiments, once a target DNA is cleaved, it can then be modified by repair mechanisms as known in the art, notably non-homologous end-joining (NHEJ) and homology-directed repair (HDR). Thus, in some embodiments, a donor DNA can be provided for assisting in repair, such as a dsDNA template for homologous recombination in HDR-mediated repair.

[0124] In some embodiments, a Cas9 polypeptide can be codon optimized for the organism comprising the target DNA as described herein and as known in the art. Non-limiting examples of the types of organisms useful with this invention include plants, bacteria, fungi, mammals, insects, or archaea. In some embodiments, a polypeptide, and/or a functional fragment thereof, having at least about 80% identity with a Cas9 polypeptide can be codon optimized to be expressed in the organism comprising the target DNA.

[0125] In some embodiments, a repeat, a tracrRNA sequence, a Cas9 polypeptide or and/or a Cas9 nucleotide sequence can be from Lactobacillus spp., Bifidobacterium spp., Kandleria spp., Leuconostoc spp., Oenococcus spp., Pediococcus spp., Streptococcus spp., Weissella spp., or Olsenella spp. In representative embodiments, a repeat, a tracRNA sequence, a Cas9 polypeptide or and/or a Cas9 nucleotide sequence can be from Bifidobacterium bombi, Bifidobacterium dentium LMG 11045, Bifidobacterium merycicum LMG 11341, Kandleria vitulina DSM 20405, Lactobacillus agilis DSM 20509, Lactobacillus animalis DSM 20602, Lactobacillus apodemi DSM 16634, Lactobacillus brevis subsp gravensis ATCC 27305, Lactobacillus buchneri CD034, Lactobacillus buchneri DSM 20057, Lactobacillus cacaonum DSM 21116, Lactobacillus casei str Zhang, Lactobacillus ceti DSM 22408, Lactobacillus coryniformis subsp coryniformis KCTC 3167, Lactobacillus coryniformis torquens, Lactobacillus crispatus FB049-03, Lactobacillus curvatus CRL 705, Lactobacillus delbrueckii subsp lactis CRL 581, Lactobacillus delbrueckii jakobsenii DSM 26046, Lactobacillus diolivorans DSM 14421, Lactobacillus farciminis DSM 20184, Lactobacillus fermentum DSM 20055, Lactobacillus floricola DSM 23037A, Lactobacillus floricola DSM 23037B, Lactobacillus fuchuensis DSM 14340, Lactobacillus futsaii JCM 17355, Lactobacillus gasseri K7, Lactobacillus graminis DSM 20719, Lactobacillus hammesii DSM 16381, Lactobacillus hominis CRBIP, Lactobacillus hordei DSM 19519A, Lactobacillus hordei DSM 19519B, Lactobacillus jensenii DSM 20557, Lactobacillus johnsonii DPC 6026, Lactobacillus lindneri DSM 20690, Lactobacillus mali ATCC 27304, Lactobacillus mindensis DSM 14500, Lactobacillus mucosae DSM 13345, Lactobacillus namurensis DSM 19117, Lactobacillus nantensis DSM 16982, Lactobacillus nodensis DSM 19682A, Lactobacillus nodensis DSM 19682B, Lactobacillus oligofermentans DSM 15707, Lactobacillus otakiensis DSM 19908, Lactobacillus ozensis DSM 23829, Lactobacillus paracasei subsp paracasei 8700:2, Lactobacillus paracasei subsp tolerans Lp17, Lactobacillus paracollinoides DSM 15502, Lactobacillus parakefiri DSM 10551, Lactobacillus pentosus KCA1, Lactobacillus pentosus IG1, Lactobacillus plantarum EGD-AQ4, Lactobacillus psittaci DSM 15354, Lactobacillus rennini DSM 20253, Lactobacillus reuteri mlc3, Lactobacillus rhamnosus GG, Lactobacillus rossiae DSM 15814, Lactobacillus ruminis ATCC 25644, Lactobacillus sakei carnosus DSM 15831, Lactobacillus salivarius TCC 118, Lactobacillus sanfranciscensis DSM 20451, Lactobacillus saniviri DSM 24301, Lactobacillus senmaizukei DSM 21775, Lactobacillus tucceti DSM 20183, Lactobacillus versmoldensis DSM 14857, Lactobacillus zymae DSM 19395, Leuconostoc gelidum JB7, Leuconostoc pseudomesenteroides 4882, Oenococcus kitaharae DSM 17330, Pediococcus inopinatus DSM 20285, Pediococcus lolii DSM 19927, Pediococcus parvulus DSM 20332A, Pediococcus parvulus DSM 20332B, Pediococcus stilesii DSM 18001, Streptococcus agalactiae GB00300, Streptococcus gallolyticus ATCC BAA-2069, Streptococcus henryi DSM 19005, Streptococcus mutans NLML5, Streptococcus oralis SK304, Streptococcus anginosus 1_2_62CV, Streptococcus anginosus DSM 20563, Streptococcus dysagalactiae subsp equisimilis, Streptococcus equi subsp zooepidemicus, Streptococcus gordonii Challis substr CH1, Streptococcus infantarius subsp infantarius, Streptococcus intermedius B196, Streptococcus lutetiensis 033, Streptococcus mitis SK321, Streptococcus mutans UA 159, Streptococcus orisratti DSM 15617, Streptococcus parasanguinis F0449, Streptococcus salivarius K12, Streptococcus sanguinis SK330, Streptococcus vestibularis ATCC 49124, Lactobacillus composti DSM 18527, Lactobacillus concavus DSM 17758, Lactobacillus secaliphilus DSM 17896, Weissella halotolerans DSM 20190, Weissella kandleri DSM 20593, and/or Olsenella uli or any combination thereof.

[0126] In some embodiments, combinations of repeats, tracrRNA sequences, Cas9 polypeptide sequences and Cas9 nucleotide sequences that may be useful with this invention are set forth in Table 1 below.

TABLE 1
Combinations of repeats, tracRNA sequences, and Cas9 polypeptides
and nucleic acid sequences useful with the invention.

| | | Cas9 | Cas9 | |
|---|---|---|---|---|
| | TracRNA | polypeptide | nucleotide | |
| Repeat | sequence | sequence | sequence | |
| (SEQ | (SEQ | (SEQ | (SEQ | PAM |
| ID NO) | ID NO) | ID NO) | ID NO) | Sequence |
| 1 | | 194 | 294 | nnC |
| 2 | 99 | 195 | 295 | |
| 3 | 100 | 196 | 296 | nGG |
| 4 | 101 | 197 | 297 | |
| 5 | 102 | 198 | 298 | nGG |
| 6 | 103 | 199 | 299 | |
| 7 | 104 | 200 | 300 | |
| 8 | 105 | 201 | 301 | nnAAAA |
| 9 | 106 | 202 | 303 | |
| 10 | 107 | 203 | 302 | nnnAnnA |
| 11 | 108 | 204 | 304 | |
| 12 | 109 | 205 | 305 | nGA |
| 13 | 110 | 206 | 306 | |
| 14 | 111 | 207 | | |
| 15 | | 208 | 307 | |
| 16 | 112 | 209 | | |
| 17 | 113 | 210 | 308 | |
| 18 | 114 | 211 | 309 | |
| 19 | 115 | 212 | 310 | |
| 20 | 116 | 213 | 311 | |
| 21 | 117 | 214 | 312 | |
| 22 | 118 | 215 | 313 | |
| 23 | 119 | 216 | 314 | |
| 24 | 120 | 217 | 315 | |
| 25 | 121 | 218 | 316 | |
| 26 | 122 | 219 | 317 | |
| 27 | 123 | 220 | 318 | nTAA |
| 28 | 124 | 221 | 319 | |
| 29 | 125 | 222 | 320 | |
| 30 | 126 | 223 | 321 | |
| 31 | 127 | 224 | 322 | |
| 32 | 128 | 225 | 323 | |
| 33 | 129 | 226 | 324 | nGG |
| 34 | 130 | 227 | 325 | |
| 35 | 131 | 228 | 326 | |
| 36 | 132 | 229 | 327 | nnAnAA |
| 37 | 133 | 230 | 328 | |
| 38 | 134 | 231 | 329 | |
| 39 | 135 | 232 | 330 | |
| 40 | 136 | 233 | 331 | |
| 41 | 137 | 234 | 332 | |
| 42 | 138 | 235 | 333 | |
| 43 | 139 | 236 | 334 | |
| 44 | 140 | 237 | 335 | |
| 45 | 141 | 238 | 336 | |
| 46 | 142 | 239 | 337 | |
| 47 | 143 | 240 | 338 | |
| 48 | 144 | 241 | 339 | |
| 49 | 145 | 241 | 340 | |
| 50 | 146 | 243 | 342 | |
| 51 | 147 | 244 | 341 | nnG |
| 52 | 148 | 245 | 343 | |
| 53 | 149 | 246 | 344 | |
| 54 | 150 | 247 | 345 | |
| 55 | 151 | 248 | | nGAAA |
| 56 | 152/153 | 249/250 | 346 | |
| 57 | 154 | 251 | 347 | |
| 58 | 155 | 252 | 348 | |
| 59 | 156 | 253 | 349 | |
| 60 | 157 | 254 | 350 | |
| 61 | 158 | 255 | 351 | |
| 62 | 159 | 256 | 352 | |
| 63 | 160 | 257 | 353 | |
| 64 | 161 | 258 | 354 | |
| 65 | 162 | 259 | 355 | |
| 66 | 163 | 260 | 356 | |
| 67 | 164 | 261 | 357 | |
| 68 | 165 | 262 | 358 | |
| 69 | 166 | 263 | 359 | nTG |
| 70 | 167 | 264 | 360 | |
| 71 | 168 | 265 | 361 | |
| 72 | 169 | 266 | 362 | AGA |
| 73 | 170 | 267 | 363 | nnAAC |
| 74 | 171 | 268 | 364 | |
| 75 | 172 | 269 | 365 | |
| 76 | 173 | 270 | 366 | |
| 77 | 174 | 271 | | |
| 78 | 175 | 272 | 367 | |
| 79 | 176 | 273 | 368 | |
| 80 | 177 | 274 | 369 | |
| 81 | 178 | 275 | 370 | |
| 82 | 179 | 276 | 371 | |
| 83 | 180 | 277 | 372 | |
| 84 | 181 | 278 | 373 | |
| 85 | 182 | 279 | 374 | |
| 86 | 183 | 280 | 375 | |
| 87 | 184 | 281 | 376 | |
| 88 | 185 | 282 | 377 | |
| 89 | 186 | 283 | 378 | |
| 90 | 187 | 284 | 379 | |
| 91 | 188 | 285 | 380 | |
| 92 | 189 | 286 | 381 | |
| 93 | 190 | 287 | 382 | |
| 94 | 191 | 288 | 383 | |
| 95 | 192 | 289 | 384 | |
| 96 | 193 | 290 | 385 | |
| 97 | | 291 | 386 | |
| 98 | | 292 | 387 | |

[0127] The invention will now be described with reference to the following examples. It should be appreciated that these examples are not intended to limit the scope of the claims to the invention, but are rather intended to be exemplary of certain embodiments. Any variations in the exemplified methods that occur to the skilled artisan are intended to fall within the scope of the invention.

### EXAMPLES

### Example 1. Modifying CRISPR-Cas Guides

[0128] Synthetic single guide RNAs (sgRNA) were designed for Lactobacillus gasseri based on the RNA-Seq confirmed boundaries for the tracrRNA and crRNAs of L. gasseri (FIG. 1, panel A). A protospacer sequence flanked by the PAM 5′-cTAAC-3′ in the FruK was selected as the target for a chromosomal self-targeting assay. The corresponding spacer sequence was designed in the guide RNA. A highly expressed promoter for the tuf gene was cloned in front of the sgRNA (FIG. 1, panel B). Using the transformation protocol for L. gasseri in a plasmid interference assay, plasmids containing the promoter and single guide were transformed into the cells. Overnight recovered cells were plated on minimal MRS containing 10% fructose, 3 ug/ml erythromycin, and bromocresol purple to assess whether the transformants retained the ability to metabolize fructose.

[0129] As shown in FIG. 1, panel C, if the Cas9 is able to utilize the sgRNA, the host chromosome will be cleaved, the cells will die, and there should be no growth on any of the plates. However, if Cas9 is able to utilize the guide to bind the target but can no longer cleave the target DNA, the colonies will be white (FIG. 1, panel E). This is shown as the grey portion of the bars in FIG. 2, panel B. Alternatively, if Cas9 is unable to utilize the guide at all, the colonies will be yellow because the cells can utilize fructose, thereby decreasing the pH of the media, and causing a colorometric change (FIG. 1, panel D).

[0130] Following the protocol outlined above, single guide RNAs (sgRNAs) based on the Lactobacillus gasseri (Lga) Type II crRNA:tracrRNA duplex (FIG. 2, panel A) were designed with mutations made to the stem (e.g., lower stem) and nexus regions (FIG. 2C and FIG. 3). The sgRNAs were cloned into a plasmid with a high-expression promoter and transformed into Lga to test the ability of the Lga endogenous Cas9 to utilize the sgRNAs. The spacer on the sgRNAs is designed to target the fruK (fructose kinase) gene. The recovered cells were plated on a media that differentiates colonies that are able to utilize fructose from those that cannot.

[0131] The design of the experiments provides several possible outcomes. (1) When the Cas9 utilizes the sgRNA, the host chromosome is cleaved and the cells die. In this scenario, there should be no growth on any of the plates. (2) When the Cas9 utilizes the guide to bind the target but can no longer cleave the target DNA (resulting from the introduced mutation), the colonies will be white because the cells are unable to ferment lactose, and therefore, there is no decrease of the pH of the media. This is shown as the grey portion of the bars in FIG. 2, panel B. (3) When the Cas9 is unable to utilize the guide at all, the colonies will be yellow because the cells can utilize fructose thereby decreasing the pH of the media and causing a colorometric change. This is shown as the black portion of the bars. In FIG. 2, panel B, the (+) refers to the empty plasmid without a guide RNA and “WT” is Lga transformed with the single guide based on the on the Lactobacillus gasseri (Lga) Type II crRNA:tracrRNA duplex without any introduced mutations.

[0132] Examples of synthetic modified/mutant guides (e.g., synthetic nucleic acid constructs of the invention) are provided in FIG. 2, panel C and FIG. 3. Example mutant guides that comprise modifications in the nexus hairpin include guide BG4, BG5, BG6, BG7, BG8, BG9, BG11, and BG12 and example mutant guides that comprise modifications in the stem include WT.5, BG2, BG10, BG12, BG13, and BG14.

[0133] The results showed that mutant guides WT.5, BG2, BG14, BG4, BG7, BG11, BG10, and BG12 (example nucleic acid constructs of the invention) were utilized by Cas9 and did not allow any transformants to be recovered. Mutant guides BG9, BG6 and BG5 each allowed some Cas9 cleavage, but also provided some binding of the target that prevented the cells from utilizing fructose and mutant guides BG13 and BG8 were more lethal than the WT guide, suggesting improved performance of these guides.

[0134] As demonstrated by the mutant guides, increasing the GC content of the nexus appears to allowed the Cas9 polypeptide to utilize the mutant guides, but did not allow the Cas9 to perform complete cleavage (see, e.g., mutant guides BG9, BG6, BG5). Mutations such as these may be useful for repression of transcription. In addition, many of the guides were able to increase the ability of Cas9 to cleave the target DNA and may be useful for improving or increasing Cas9 activity for, for example, killing of cells.

TABLE 2
L. gasseri single guide sequences (FIG. 2)

| | |
|---|---|
| BG WT | TTTAATTGCATAACATAATCTAATGCTGGAgttttagatggtcgaaaccagatttaaa |
| | atcaagcaatgcatcttttgatgcaaagtttcaatacttgtcccgagctatcgagggacttttttGGATCCAC |
| | A SEQ ID NO:389 |
| BG 1 LS GU | TTTAATTGCATAACATAATCTAATGCTGGAttttagatggtcgaaaccagatttaaaat |
| wobble | caagcaatgcatcttttgatgcaaagtttcaatacttgtcccgagctatcgagggacttttttGGATCCACA |
| | SEQ ID NO: 390 |
| BG 2 LS V1 | TTTAATTGCATAACATAATCTAATGCTGGAgtGGtagatggtcgaaaccagattta |
| | aaatcaagcaatgcatettttgatgcaaagfficaatacttgteccgagetatcgagggacttttttGGATCCA |
| | CA SEQ ID NO: 391 |
| BG 3 LS V2 | TTTAATTGCATAACATAATCTAATGCTGGAgGGGGagatggtcgaaaccagatc |
| | tCCCCtcaagcaatgcatcttttgatgcaaagtttcaatacttgtcccgagctatcgagggacttttttGGATC |
| | CACA SEQ ID NO: 392 |
| BG 4 | TTTAATTGCATAACATAATCTAATGCTGGAgttttagatggtcgaaaccagatttaaa |
| nexus_spc | atcCCaagcaatgcatcttttgatgcaaagtttcaatacttgtcccgagctatcgagggacttttttGGATCCA |
| | CA SEQ ID NO: 393 |
| BG 5 | TTTAATTGCATAACATAATCTAATGCTGGAgttttagatggtcgaaaccagatttaaa |
| nexus_shortup | atcaagcaagccttttggcaaagtttcaatacttgtcccgagctatcgagggacttttttGGATCCACA |
| | SEQ ID NO: 394 |
| BG 6 | TTTAATTGCATAACATAATCTAATGCTGGAgttttagatggtcgaaaccagatttaaa |
| nexus_lower | atcGGgcaatgcatcttttgatgcaaagCCCcaatacttgtcccgagctatcgagggacttttttGGATCC |
| | ACA SEQ ID NO: 395 |
| BG 7 | TTTAATTGCATAACATAATCTAATGCTGGAgttttagatggtcgaaaccagatttaaa |
| nexus_low_inc | atcAaagcaatgcatcttttgatgcaaagtttTcaatacttgtcccgagctatcgagggacttttttGGATCCA |
| | CA SEQ ID NO: 396 |
| BG 8 | TTTAATTGCATAACATAATCTAATGCTGGAgttttagatggtcgaaaccagatttaaa |
| nexus_GU | atcaagcaatgcatcttttgatgcaaagCttcaatacttgtcccgagctatcgagggacttttttGGATCCAC |
| | A SEQ ID NO: 397 |
| BG 9 | TTTAATTGCATAACATAATCTAATGCTGGAgttttagatggtcgaaaccagatttaaa |
| nexusAAtoAG | atcaagcaatgcatcttttgatgcaaGgtttcaatacttgtcccgagctatcgagggacttttttGGATCCAC |
| | A SEQ ID NO: 398 |
| BG 10 US- | TTTAATTGCATAACATAATCTAATGCTGGAgttttagacgaagatttaaaatcaagca |
| removed | atgcatcttttgatgcaaagtttcaatacttgtcccgagctatcgagggacttttttGGATCCACA |
| | SEQ ID NO: 399 |
| BG 11 | TTTAATTGCATAACATAATCTAATGCTGGAgttttagatggtcgaaaccagatttaaa |
| nexus_tail | atcaagcaatgcatcttttgatgcaaagtttGTTtacttgtcccgagctatcgagggacttttttGGATCCAC |
| | A SEQ ID NO: 400 |
| BG 12 | TTTAATTGCATAACATAATCTAATGCTGGAgAAAATTTtggtcgaaaccagatT |
| LS_AUtoUA | TTTAGAcaagcaatgcatcttttgatgcaaagtttcaatacttgtcccgagctatcgagggacttttttGGAT |
| | CCACA SEQ ID NO: 401 |
| BG 13 | TTTAATTGCATAACATAATCTAATGCTGGAgCtttagatggtcgaaaccagatttaa |
| LS_ATtoCG | aGtcaagcaatgcatcttttgatgcaaagtttcaatacttgtcccgagctatcgagggacttttttGGATCCA |
| | CA SEQ ID NO: 402 |

[0135] FIG. 4 provides example WT single guides from various bacteria that may be used as templates for modifying single guides as described herein. These guides include that for Streptococcus pyrogenes, Lactobacillus rhamnosus, Lactobacillus jensenii, Lactobacillus casei, Lactobacillus gasseri, Lactobacillus buchneri, Oenococcus kitaharae, Streptococcus thermophiles CRISPR1, Lactobacillus animalis and Lactobacillus mali. Similar to the above example showing mutations in the stem and nexus hairpin regions of the L. gasseri WT guide, the WT guides for these other organisms may be mutated to provide synthetic mutated guides (e.g., synthetic nucleic acid construct or protein-RNA complex of the invention) having a different functionality from the wild type guide on which the mutated guide was based.

The application's sequence listing, which the Patent Office published only in electronic form, follows.

SEQUENCE LISTING (402 sequences)

SEQ ID NO: 1 - DNA, 37 bp, Bifidobacterium bombi
ccagtatatcagaggggctttagattgaatttgaaac

SEQ ID NO: 2 - DNA, 36 bp, Bifidobacterium dentium LMG 11045
caagtttatcaagaagggtagaagctaattcccagt

SEQ ID NO: 3 - DNA, 36 bp, Bifidobacterium merycicum LMG 11341
gtttcagatgcctgtcagatcaaggacctagaccac

SEQ ID NO: 4 - DNA, 36 bp, Kandleria vitulina DSM 20405
gttttagagttgtgttattttgaacagatacaaaac

SEQ ID NO: 5 - DNA, 36 bp, Lactobacillus agilis DSM 20509
gtctcagaagtatgttaaatcaatgatgtttagtac

SEQ ID NO: 6 - DNA, 36 bp, Lactobacillus animalis DSM 20602
gttttagagctatgttgttttgtatgactccaaaac

SEQ ID NO: 7 - DNA, 36 bp, Lactobacillus apodemi DSM 16634
gttttagagctatgtagttttgtatgactccaaaac

SEQ ID NO: 8 - DNA, 36 bp, Lactobacillus brevis subsp gravensis ATCC 27305
gctttagtaggatgttaaatcaatgatgttaaaccc

SEQ ID NO: 9 - DNA, 36 bp, Lactobacillus buchneri DSM 20057
gctttagtagtagttcaaaacaatgatgttttatcc

SEQ ID NO: 10 - DNA, 36 bp, Lactobacillus buchneri CD034
gttttagaaggatgttaaatcaataaggttaaaccc

SEQ ID NO: 11 - DNA, 36 bp, Lactobacillus cacaonum DSM 21116
gtttttgtactctcaacattttcctatcagtaaaac

SEQ ID NO: 12 - DNA, 36 bp, Lactobacillus casei str Zhang
gtctcaggtagatgtcgaatcaatcagttcaagagc

SEQ ID NO: 13 - DNA, 36 bp, Lactobacillus ceti DSM 22408
gtttgagaagtgtgttgttctcgataggtcttaaac

SEQ ID NO: 14 - DNA, 36 bp, Lactobacillus coryniformis subsp coryniformis KCTC 3167
gttttagaagagtgttaaatcaatgagtttagaacc

SEQ ID NO: 15 - DNA, 36 bp, Lactobacillus coryniformis torquens
gctattgattccttcagttttcagctaaaatagatc

SEQ ID NO: 16 - DNA, 36 bp, Lactobacillus crispatus FB049-03
gttttagatgattgttagatcaatgaggtttagatc

SEQ ID NO: 17 - DNA, 36 bp, Lactobacillus curvatus CRL 705
gttttagaagagtatcaaatcaatgagtagttcaac

SEQ ID NO: 18 - DNA, 36 bp, Lactobacillus delbrueckii subsp lactis CRL 581
gttttagaaggttgtctattcaataaggtttaaccc

SEQ ID NO: 19 - DNA, 36 bp, Lactobacillus delbrueckii jakobsenii DSM 26046
gggttaaaccttattgaatagacaaccttctaaaac

SEQ ID NO: 20 - DNA, 36 bp, Lactobacillus diolivorans DSM 14421
gttttagaagactgttgaatcaatgatgtttagtcc

SEQ ID NO: 21 - DNA, 36 bp, Lactobacillus farciminis DSM 20184
gttttagaagtatgtctttctatttacttaagaacc

SEQ ID NO: 22 - DNA, 36 bp, Lactobacillus fermentum DSM 20055
gtcttggatgagtgtcagatcagtagttccgagtac

SEQ ID NO: 23 - DNA, 36 bp, Lactobacillus floricola DSM 23037 A
gtttcagaagtatgtcatttgaataatgttaggact

SEQ ID NO: 24 - DNA, 36 bp, Lactobacillus floricola DSM 23037 B
gttttagaagtatgtcaaatcaataaggttaatacc

SEQ ID NO: 25 - DNA, 36 bp, Lactobacillus fuchuensis DSM 14340
gttttagaagagtatcaaatcaatgagttcatcaac

SEQ ID NO: 26 - DNA, 36 bp, Lactobacillus futsaii JCM 17355
gtttttgtaccttaaagaatctagaaatagtaaaac

SEQ ID NO: 27 - DNA, 36 bp, Lactobacillus gasseri K7
gttttagatggttgttagatcaataaggcttagatc

SEQ ID NO: 28 - DNA, 36 bp, Lactobacillus graminis DSM 20719; identical to SEQ ID NO: 17

SEQ ID NO: 29 - DNA, 36 bp, Lactobacillus hammesii DSM 16381
gctttagattagtgacaattcagtaaggtcaagagc

SEQ ID NO: 30 - DNA, 36 bp, Lactobacillus hominis CRBIP
gttttagttagttgttagatcaataaggtttagatc

SEQ ID NO: 31 - DNA, 35 bp, Lactobacillus hordei DSM 19519 A
gttttagaaagacgttaaaccaataatgttagatc

SEQ ID NO: 32 - DNA, 36 bp, Lactobacillus hordei DSM 19519 B; identical to SEQ ID NO: 11

SEQ ID NO: 33 - DNA, 36 bp, Lactobacillus jensenii DSM 20557
gttttagaaggttgttaaatcagtaagttgaaaaac

SEQ ID NO: 34 - DNA, 36 bp, Lactobacillus johnsonii DPC 6026
gttttagatggttgttagatcaataaggtttagatc

SEQ ID NO: 35 - DNA, 36 bp, Lactobacillus lindneri DSM 20690
gttcttaatctcattagaatgacgtacttctaaaac

SEQ ID NO: 36 - DNA, 36 bp, Lactobacillus mali ATCC 27304
gtttttgcactctcaacattttcctatcaataaaac

SEQ ID NO: 37 - DNA, 35 bp, Lactobacillus mindensis DSM 14500
gttttagaagtaagtcatctcaattactaagaacc

SEQ ID NO: 38 - DNA, 36 bp, Lactobacillus mucosae DSM 13345
gctttagatggatgttaaatcaatgatgtaattctc

SEQ ID NO: 39 - DNA, 36 bp, Lactobacillus namurensis DSM 19117
gtttcaaatgagtggtaaatctataaggtcaatacc

SEQ ID NO: 40 - DNA, 36 bp, Lactobacillus nantensis DSM 16982
gtttttgtaccttcaaagatttagaaacagtaaaac

SEQ ID NO: 41 - DNA, 36 bp, Lactobacillus nodensis DSM 19682 A
gttttagtactctcaagaatttagtaacagtaaaac

SEQ ID NO: 42 - DNA, 36 bp, Lactobacillus nodensis DSM 19682 B
gttttagaagtacgtcatttcatgtagttaagaacc

SEQ ID NO: 43 - DNA, 36 bp, Lactobacillus oligofermentans DSM 15707
gttttagaagagtatcaaatcaatgagttcgagacc

SEQ ID NO: 44 - DNA, 36 bp, Lactobacillus otakiensis DSM 19908; identical to SEQ ID NO: 10

SEQ ID NO: 45 - DNA, 36 bp, Lactobacillus ozensis DSM 23829
gttattaatacattacaaatacatagatgttataat

SEQ ID NO: 46 - DNA, 36 bp, Lactobacillus paracasei subsp paracasei 8700:2; identical to SEQ ID NO: 12

SEQ ID NO: 47 - DNA, 36 bp, Lactobacillus paracasei subsp tolerans Lpl7; identical to SEQ ID NO: 12

SEQ ID NO: 48 - DNA, 36 bp, Lactobacillus paracollinoides DSM 15502
gttttagatgaatatcaaatcaatgaggttcaaagc

SEQ ID NO: 49 - DNA, 36 bp, Lactobacillus parakefiri DSM 10551; identical to SEQ ID NO: 10

SEQ ID NO: 50 - DNA, 36 bp, Lactobacillus pentosus IG1
gtttcagaaggacattaaatcaataaggtcaagacc

SEQ ID NO: 51 - DNA, 36 bp, Lactobacillus pentosus KCA1
gtcttgaatagtagtcatatcaaacaggtttagaac

SEQ ID NO: 52 - DNA, 36 bp, Lactobacillus plantarum EGD-AQ4; identical to SEQ ID NO: 51

SEQ ID NO: 53 - DNA, 36 bp, Lactobacillus psittaci DSM 15354; identical to SEQ ID NO: 33

SEQ ID NO: 54 - DNA, 36 bp, Lactobacillus rennini DSM 20253
gttttagaagagtatcaaatcaatgagtttatcaac

SEQ ID NO: 55 - DNA, 36 bp, Lactobacillus reuteri mlc3
gttttagatgtacttcaaatcaataatgtttagaac

SEQ ID NO: 56 - DNA, 36 bp, Lactobacillus rhamnosus GG
gtctcaggtagatgtcagatcaatcagttcaagagc

SEQ ID NO: 57 - DNA, 36 bp, Lactobacillus rossiae DSM 15914
gttttagatgtatgtcagatcaatagggttaagaac

SEQ ID NO: 58 - DNA, 36 bp, Lactobacillus ruminis ATCC 25644
gtttcagctggatgtcatatcaatgatgttatgaac

SEQ ID NO: 59 - DNA, 36 bp, Lactobacillus sakei carnosus DSM 15831; identical to SEQ ID NO: 17

SEQ ID NO: 60 - DNA, 36 bp, Lactobacillus salivarius UCC 118
gtttcagaagtatgttaaatcaataaggttaagacc

SEQ ID NO: 61 - DNA, 36 bp, Lactobacillus sanfranciscensis DSM 20451
gttttagaagtacgtcattctaatgagattaagagc

SEQ ID NO: 62 - DNA, 36 bp, Lactobacillus saniviri DSM 24301
gttttagttggatgtcagatcaaataggttaagcac

SEQ ID NO: 63 - DNA, 36 bp, Lactobacillus senmaizukei DSM 21775
gttttagttcagtgacaaatcaatagagttaagaac

SEQ ID NO: 64 - DNA, 36 bp, Lactobacillus tucceti DSM 20183
gtttttgtactcttaaggatttagtaatagtaaaac

SEQ ID NO: 65 - DNA, 36 bp, Lactobacillus versmoldensis DSM 14857
gttttagatctaagtcatctcaattacttaagaacc

SEQ ID NO: 66 - DNA, 36 bp, Lactobacillus zymae DSM 19395
gttttagatgagtggtaaatctagaaggtcaaaagc

SEQ ID NO: 67 - DNA, 36 bp, Leuconostoc gelidum JB7
gcttcagatgtgtgtcagatcaatgaggtttaaacc

SEQ ID NO: 68 - DNA, 36 bp, Leuconostoc pseudomesenteroides 4882
gtataaagccccattgatctgacatacatctgaagc

SEQ ID NO: 69 - DNA, 36 bp, Oenococcus kitaharae DSM 17330
gcttcagatgtgtgtcagatcaatgaggtagaaccc

SEQ ID NO: 70 - DNA, 36 bp, Pediococcus inopinatus DSM 20285
gttttagaagagtgtcgaatcaatatagttaagatc

SEQ ID NO: 71 - DNA, 36 bp, Pediococcus lolii DSM 19927
gtttcagaaggatgttaaatcaataaggttaagatc

SEQ ID NO: 72 - DNA, 36 bp, Pediococcus parvulus DSM 20332 A; identical to SEQ ID NO: 71

SEQ ID NO: 73 - DNA, 36 bp, Pediococcus parvulus DSM 20332B
gttttagaagagtgtcgaatcaatatagttaagagc

SEQ ID NO: 74 - DNA, 36 bp, Pediococcus stilesii DSM 18001
gtttcagagggatgttaaagaagtaggttcaatatc

SEQ ID NO: 75 - DNA, 36 bp, Steptococcus agalactiae GB00300
gttttagagctgtgctgtttcgaatggttccaaaac

SEQ ID NO: 76 - DNA, 36 bp, Steptococcus gallolyticus ATCC BAA-2069; identical to SEQ ID NO: 75

SEQ ID NO: 77 - DNA, 36 bp, Steptococcus henryi DSM 19005
gtttttgtactctcaagatttaagtaactgtaaaac

SEQ ID NO: 78 - DNA, 36 bp, Steptococcus mutans NLML5
gtttttgtactctcaagatttaagtaactgtacaac

SEQ ID NO: 79 - DNA, 36 bp, Steptococcus oralis SK304
gttttagagctgtgttgtttcgaatggttccaaaac

SEQ ID NO: 80 - DNA, 36 bp, Streptococcus anginosus 1_2_62CV; identical to SEQ ID NO: 77

SEQ ID NO: 81 - DNA, 36 bp, Streptococcus anginosus DSM 20563; identical to SEQ ID NO: 75

SEQ ID NO: 82 - DNA, 36 bp, Streptococcus dysagalactiae subsp equisimilis
gttttagagctatgttgttttgaatggtcccaaaac

SEQ ID NO: 83 - DNA, 36 bp, Streptococcus equi subsp zooepidemicus
gttttagagttatgctgtattgaatggttccaaaac

SEQ ID NO: 84 - DNA, 36 bp, Streptococcus gordonii Challis substr CH1; identical to SEQ ID NO: 78

SEQ ID NO: 85 - DNA, 36 bp, Streptococcus infantarius subsp infantarius
gtttttgtactctcaagatttaagtaaccgtaaaac

SEQ ID NO: 86 - DNA, 36 bp, Streptococcus intermedius B196
gtttttgtactctcaagatttaagtaactgcaaaac

SEQ ID NO: 87 - DNA, 36 bp, Streptococcus lutetiensis 033; identical to SEQ ID NO: 79

SEQ ID NO: 88 - DNA, 36 bp, Streptococcus mitis SK321; identical to SEQ ID NO: 79

SEQ ID NO: 89 - DNA, 36 bp, Streptococcus mutans TA 159; identical to SEQ ID NO: 79

SEQ ID NO: 90 - DNA, 36 bp, Streptococcus orisratti DSM 15617; identical to SEQ ID NO: 77

SEQ ID NO: 91 - DNA, 36 bp, Streptococcus parasanguinis F0449; identical to SEQ ID NO: 86

SEQ ID NO: 92 - DNA, 36 bp, Streptococcus salivarius K12; identical to SEQ ID NO: 79

SEQ ID NO: 93 - DNA, 36 bp, Streptococcus sanguinis SK330; identical to SEQ ID NO: 79

SEQ ID NO: 94 - DNA, 36 bp, Streptococcus vestibularis ATCC 49124; identical to SEQ ID NO: 78

SEQ ID NO: 95 - DNA, 36 bp, Lactobacillus composti DSM 18527
gttctggaagtatgtcagatcaatggattcaagagc

SEQ ID NO: 96 - DNA, 36 bp, Lactobacillus concavus DSM 17758
gttttagaagagtgtcatttcaataaggttaagatc

SEQ ID NO: 97 - DNA, 36 bp, Weissella halotolerans DSM 20190
gctttagatgtatgtcagattaatggggtttattcc

SEQ ID NO: 98 - DNA, 36 bp, Weissella kandleri DSM 20593
gcttcatatctctgtcaaattaatgagttgtttagc

SEQ ID NO: 99 - DNA, 136 bp, Bifidobacterium dentium LMG 11045
tggctttatcaagaatggtgagaccagtccgatggtggatgaggatctgctctttttcattacgaaatccataaaaaggaatgacatcatgcaattcaacatatccatagctgtattgcatgatgtcattcctttt

SEQ ID NO: 100 - DNA, 129 bp, Bifidobacterium merycicum LMG 11341
ggtgtctaggtccttgacctgataggcatatattgaaataaagcaagacccttgggtcaagcttcagaaggttttagacctggccttatggccatggggctcccggcagcgccgggagcccctctttct

SEQ ID NO: 101 - DNA, 109 bp, Kandleria vitulina DSM 20405
agttttggtctgttcaaaataacacaacgagttaaaataaagcttatgcttaaatgctggttatccagttgtcatttagatgacgtgcatcacttcggtgatgcttttt

SEQ ID NO: 102 - DNA, 126 bp, Lactobacillus agilis DSM 20509
catctaaacattattgatttaacatactgtgttgagatcaaacggagctttttagcgatgtttatccttttgagccattatatggccatacatattataaaaagtgcccctaaaagggcacttttt

SEQ ID NO: 103 - DNA, 104 bp, Lactobacillus animalis DSM 20602
ctagtggagttatacaaaacaacattagcgaagttaaaataaggtttaatccgtaatcaacaagttttatcttgcgcgcgccgtttcggcgctttttttgtttt

SEQ ID NO: 104 - DNA, 88 bp, Lactobacillus apodemi DSM 16634
tacgtggagtcatacaaagccacatagcaagttaaaataaggttttatccgtaatcaatcatgggcgctgtttcggcgcctatttttt

SEQ ID NO: 105 - DNA, 103 bp, Lactobacillus brevis subsp gravensis ATCC 27305
cctgtttaacatcattgatttaacatcctggtttaaagtcaaacaaggcagtaatgccaagttcttacttatgactcacgtatgtgagcatacatataaaaaa

SEQ ID NO: 106 - DNA, 102 bp, Lactobacillus buchneri DSM 20057
cggatagacatcattgttttgaactactggtttaaagtcaaacaaggtagcaataccaagttcttacttatgacccatttatatgggcatacatacaataaa

SEQ ID NO: 107 - DNA, 139 bp, Lactobacillus buchneri CD034
atgtttgaccttattgatttaacatcctgtgttaaaatcaagcaaagcgctttgcgcggagtttcaacttttgacccattatatgggcattacataagcgaaaggaaccattcttcagttggagaatggttcctttttt

SEQ ID NO: 108 - DNA, 81 bp, Lactobacillus cacaonum DSM 21116
gttttattgataggaaaatgattgagaatctacaaagataaggctttatgccgaaatgactgcctttatggcagttttttt

SEQ ID NO: 109 - DNA, 109 bp, Lactobacillus casei str Zhang
cgttttgaactgattgattcgacatctacacgttgagatcaaacaaagcctcggctgagtttcaatttctgagcccatgttgggccatacataccgccatccgggaaaa

SEQ ID NO: 110 - DNA, 102 bp, Lactobacillus ceti DSM 22408
gttttaagacctatcgagaacaacacacttaagttcaaataaaaatttattctattgaccagaaatggcagcccgctgtgggcattttaacttcattttttt

SEQ ID NO: 111 - DNA, 113 bp, Lactobacillus coryniformis subsp coryniformis KCTC 3167
ctatctaaacttattgatttaacactctgagttaaaatcaaacaaggcgtaagccaagtttcatcttgtgagtccctatggaccataaaggcgctattgatcttcgtgatcaa

SEQ ID NO: 112 - DNA, 112 bp, Lactobacillus crispatus FB049-03
actcttaaccttattgatctaacaatcataatttaaaatcaagcaatgcgttttagtacgcagagtttcaacacttgtcccgagctatcgagggactttttttatgtaaaaa

SEQ ID NO: 113 - DNA, 113 bp, Lactobacillus curvatus CRL 705
atcgaaatactcattgatttgatactctgagttaaaatcaaacaaggtcttcggaccaagttttctattctaagcctcttatgaggcctttttttatgccttcaaaccaaaaa

SEQ ID NO: 114 - DNA, 109 bp, Lactobacillus delbrueckii subsp lactis CRL 581
acgtttgaccttattgaatagacaacctgatttaaaatcaagcaaagctcttcggagcggagtttatacatttgtcccgtgtattgcgggctttttttatgcaacaaaa

SEQ ID NO: 115 - DNA, 97 bp, Lactobacillus delbrueckii jakobsenii DSM 26046
acgttagaccttattgaatagacaacctgatttaaaatcaagcaaagctcttcggagtggagtttatacatttgtcccgcgtattgcgggctttttt

SEQ ID NO: 116 - DNA, 97 bp, Lactobacillus diolivorans DSM 14421
tgggatgtcattgtctgaatcaatgattgaaaaatataacgctcaccgtgatcacttgaagctactcaaacagctcgaggataagattgacgatccg

SEQ ID NO: 117 - DNA, 102 bp, Lactobacillus farciminis DSM 20184
ggttcgtaagtaaatagaaagacatacttagattaaaataaacaataatgttaaatggtcgtaaggctgctcccgcgtgggggctttttttttgcctttttt

SEQ ID NO: 118 - DNA, 106 bp, Lactobacillus fermentum DSM 20055
acattcgagactactgatctaacactcatagtcaagatcaaacgagtggttttccacgagttattacttttgagccatgttattctggccatacatataataaaaa

SEQ ID NO: 119 - DNA, 120 bp, Lactobacillus floricola DSM 23037 A
gttcttaacattattcaaatgacatactgagttgaaatcaaacaaggatttattccaagttttatattttgaacctctttttgaggtcagacctctttcttaattgaaagaggttttttt

SEQ ID NO: 120 - DNA, 125 bp, Lactobacillus floricola DSM 23037 B
ttcattaaccttattgatttgacatactgagttaaaataaaacaatgcgtaagcaaagtttacacttattagccatttatagttggcaatacataaagaaagacctaggtcatatgacctaggtc

SEQ ID NO: 121 - DNA, 106 bp, Lactobacillus fuchuensis DSM 14340
accgataaactcattgatttgatactctgggttaaaatcaaacgaaaccttcgggttaagtttttacttctgagcctcgtatgaggcctttttttatgccttcatt

SEQ ID NO: 122 - DNA, 90 bp, Lactobacillus futsaii JCM 17355
gttttactatttctagattctttaagatctacaaaaataaggatttattccgaatttaccacctattttaattaataggtggtttttttt

SEQ ID NO: 123 - DNA, 112 bp, Lactobacillus gasseri K7
acactaaactttattgatctaacaaccagatttaaaatcaagcaatgcatcttttgatgcaaagtttcaatacttgtcccgagctatcgagggactttttttatgcaaaaaa

SEQ ID NO: 124 - DNA, 92 bp, Lactobacillus graminis DSM 20719
gaaatactcattgatttgatactctgagttaaaatcaaacaaggtctttggaccaagttttctattctgagcctcttatgaggccttttttt

SEQ ID NO: 125 - DNA, 138 bp, Lactobacillus hammesii DSM 16381
ccgcttgatcttactgaattgtcactaagagttaaagtcagacaaggtggtttaccaccaagttttatcttatgagcccgttatcgagccatacatatcttgttagagtcctttgctgaatgcgtcagcgaaggactc

SEQ ID NO: 126 - DNA, 112 bp, Lactobacillus hominis CRBIP
actctaaactttattgatctaacaaccagatttaaaatcaagcaatgcatcttttgatgcaaagtttcaacacttgtcccgagctatcgagggactttttttatacaaaaaa

SEQ ID NO: 127 - DNA, 141 bp, Lactobacillus hordei DSM 19519 A
ggattaacattattggtttaacgtcttgttttaaaatcaaacaaaacactttagtgttgagttttaacttttgacccactttattagtgggcagtacataaaaaaggaatcactcttataatgaggagtgattcctttttt

SEQ ID NO: 128 - DNA, 83 bp, Lactobacillus hordei DSM 19519 B
gttttgttgataggaaaatgattgagaatctacaaagataaggctttatgccgaaattactgcctttttggcagttttttttt

SEQ ID NO: 129 - DNA, 115 bp, Lactobacillus jensenii DSM 20557
acatttcaatttactgatttaacaaccttatttttaaaatcaagcaaggctttcgggccgagttttcacatgtgtaccgcttatagcggtctttttttttgcagtaaataaaaaa

SEQ ID NO: 130 - DNA, 112 bp, Lactobacillus johnsonii DPC 6026
catctaaactttattgatctaacaaccagatttaaaatcaagcaatgcatcttttgatgcaaagtttcaatatttgtcccacgttatcgagggactttttttatacaaaaaa

SEQ ID NO: 131 - DNA, 94 bp, Lactobacillus lindneri DSM 20690
cattttaatctcattagaatgacgtactgagttaaaatcaaacaaagccttatgctgagttttatcttttgagcccttaagggccatacatata

SEQ ID NO: 132 - DNA, 82 bp, Lactobacillus mali ATCC 27304
gttttattgataggaaaatgattgagaatctgcaaagataaggctttatgccgaaattactgcctcttaggcagtttttttt

SEQ ID NO: 133 - DNA, 92 bp, Lactobacillus mindensis DSM 14500
gctcttaagtaattgagatgacttactgagttaaaataaacattaaagttaaatgaccttctggtcggctcccgcgtgggggctattttttt

SEQ ID NO: 134 - DNA, 104 bp, Lactobacillus mucosae DSM 13345
aggaataacatcattgatttaacatccagagttaaagtcaaacaatgcattctgcaaagttatttcttctgacccatttattaatgggcaatacatattaaaaa

SEQ ID NO: 135 - DNA, 140 bp, Lactobacillus namurensis DSM 19117
ctgtttgaccttatagatttaccactcagagttgaaatcaaacaagatgctttagcatcaagtttcccattgtgagcccgttatcggtgccatacatattaaaacgaccaagccaccttttcgtgacttggtcgtttttt

SEQ ID NO: 136 - DNA, 90 bp, Lactobacillus nantensis DSM 16982
gttttactgtttctaaatctttgaagatctacaaaaataaggatttattccgaatttaccacctattttaaaaaataggtggtttttttt

SEQ ID NO: 137 - DNA, 96 bp, Lactobacillus nodensis DSM 19682 A
gttttactgttactaaattcttgagaacctactaaaataaggatttattccgaatttaccacctattttttaataggtggtttttttttacaaaaa

SEQ ID NO: 138 - DNA, 96 bp, Lactobacillus nodensis DSM 19682 B
ttgttcaaactacatgaaatgacgtactgagttaaaatcaacatttatgttaaatagtctcaattgactggctcccgcgtgggggctatttttttt

SEQ ID NO: 139 - DNA, 136 bp, Lactobacillus oligofermentans DSM 15707
cacatcgaattcattgatttgatactctgagttaaaatcaagcaaggcgcaagccaagtttaatcttctgagtcctgtatgggaccatacataaagagcgttattgatttcattatcaataacgctctattttatt

SEQ ID NO: 140 - DNA, 140 bp, Lactobacillus otakiensis DSM 19908
atgtttgaccttattgatttaacatcctgtgttaaaatcaagcaatgcgctttgcgcggagtttccacttttgacccattatatgggcattacataagctaaaggaaccattcttcgatttggagaatggttcctttttt

SEQ ID NO: 141 - DNA, 110 bp, Lactobacillus ozensis DSM 23829
attataacatctatgtatttgaaatgtattaatgcatcaaaatcttagatcacaatttctataatatacgtaaaacagcaaattttactttataagaatttttatatttt

SEQ ID NO: 142 - DNA, 109 bp, Lactobacillus paracasei subsp paracasei 8700:2; identical to SEQ ID NO: 109

SEQ ID NO: 143 - DNA, 108 bp, Lactobacillus paracasei subsp tolerans Lpl7
cgttttgaactgattgattcgacatctacacgttgagatcaaacaaagcttcggctgagtttcaatttttgagcccatgttgggccatacatacgccatccgggaaaa

SEQ ID NO: 144 - DNA, 69 bp, Lactobacillus paracollinoides DSM 15502
acttaataacctcattgatttgatattcagagttaaaatcaaacaaggcttatgccaagttttctcttt

SEQ ID NO: 145 - DNA, 140 bp, Lactobacillus parakefiri DSM 10551
atgtttgaccttattgatttaacatcctgtgttaaaatcaagcaatgcgctttgcgcggagtttccacttttgacccattatatgggcattacataagcgaaaggaaccattcttcgatttggagaatggttcctttttt

SEQ ID NO: 146 - DNA, 109 bp, Lactobacillus pentosus IG1
acacttgaccttattgatttaatgtcctttatttgaaatcaaacaacaccattcatggtgaagttttcacacctgtccatcctatatatatggacacctacataaaaaa

SEQ ID NO: 147 - DNA, 117 bp, Lactobacillus pentosus KCA1
gttctaaaccttcttgatatgactactagcgtcaagatcaaacaaggcattttgccgagtttcaccttttgagtccgtattcggaccattacatatgtatcaagatgtcgcccattt

SEQ ID NO: 148 - DNA, 103 bp, Lactobacillus plantarum EGD-AQ4
gttctaaaccttcttgatatgactactagcgtcaagatcaaacaaggcattttgccgagtttcaccttttgagtccgtattcggaccattacatatgtatcaa

SEQ ID NO: 149 - DNA, 106 bp, Lactobacillus psittaci DSM 15354
acaatctcaacatttcaatttactgatttaacaacctgatttaaaatcaagcaaggtcttcggaccgagttttcacatttgtaccgcttatagcggtctttttttt

SEQ ID NO: 150 - DNA, 93 bp, Lactobacillus rennini DSM 20253
attgaaagattcattgatttgatactctgagttaaaatcaaacaaaccttcgggtgagtttttacttctgagcctcgtatggggccttttttt

SEQ ID NO: 151 - DNA, 109 bp, Lactobacillus reuteri mlc3
ctactaaatattattgatttgaagtacagagttaaaatcaaacaagtgcttcagcacaagtttctacttttgagtcagttatctgaccaatacataaaagggaattaaa

SEQ ID NO: 152 - DNA, 110 bp, Lactobacillus rhamnosus GG
caacttgaattgattgatctgacatctacgagttgagatcaaacaaagcttcagctgagtttcaatttctgagcccatgttgggccatacatatgccacccgagtgcaaa

SEQ ID NO: 153 - DNA, 110 bp, Lactobacillus rhamnosus GG; identical to SEQ ID NO: 152

SEQ ID NO: 154 - DNA, 143 bp, Lactobacillus rossiae DSM 15814
acttttgaccctattgatctgacatacagcgttaaaatcaagcaaggctttcgagccaagtttaaatctttgggttcgctattcggaccgtacatagtaaaagggcgtcatcgagttcaaattcgatggcgccctttagtttt

SEQ ID NO: 155 - DNA, 103 bp, Lactobacillus ruminis ATCC 25644
acgtaaaacatcattgatatgacatccagaagttgaaatcaagcaagacttaaagtcaagcttctacttttgattcacgttttgtggacagtacatattgaca

SEQ ID NO: 156 - DNA, 95 bp, Lactobacillus sakei carnosus DSM 15831
accgaaatactcattgatttgatactctgagttaaaatcaaacaaggtcttttgaccaagttttctattctgagcctcttatgaggccttttttt

SEQ ID NO: 157 - DNA, 119 bp, Lactobacillus salivarius UCC 118
ggttttgacctcattgatttaacattctgagttgaaatcaaacaaggcttttatagctgagtttttctttttgatccatatatatggactatacataaaaaggagtcatctgactcctt

SEQ ID NO: 158 - DNA, 99 bp, Lactobacillus sanfranciscensis DSM 20451
attttaatctcattagaatgacgtactgagttaaaatcaaacaaggtcttgtgccaagttttatcttctgagcccttaagggccatacatataagaaaa

SEQ ID NO: 159 - DNA, 128 bp, Lactobacillus saniviri DSM 24301
acgtttaacctatttgatctgacattcaaggttaaaatcaaacaaggcttcggccaagttttattcttagggctcgctatcgagccatacataaaaacacacccgtttcggcgggtgtgttttctttt

SEQ ID NO: 160 - DNA, 129 bp, Lactobacillus senmaizukei DSM 21775
acgcttgactctattgatttgtcactgaaagttaaaatcaagcaaggccttgtgccaagttttactttttgagcccggtatcgagccatacatagtcggcccttccagtcatgtggaagggccgttttt

SEQ ID NO: 161 - DNA, 86 bp, Lactobacillus tucceti DSM 20183
gttttactattactaaattcttaaggatctacaaaaataaggatttattccgaatttaccacctacttgttaggtggttttttttt

SEQ ID NO: 162 - DNA, 167 bp, Lactobacillus versmoldensis DSM 14857
atgttctaagtaattgagatgacttagagaattaaaatcaacattaaagtaaatcgatcattttgattgggcccaatggggcctatttttttgctctgaatttttagtcgatatgtttaattgatttaaataatccggttggtgattcataaataaaatcagttttt

SEQ ID NO: 163 - DNA, 143 bp, Lactobacillus zymae DSM 19395
ctgcttgaccttctagatttaccactcagtgttaaaatcaaacaagatactgcggtatcaagttttcctttttgagctcgttatcgagccaatacataattaaacgaccaactcactggcagtccaatgagttggtcattttt

SEQ ID NO: 164 - DNA, 140 bp, Leuconostoc gelidum JB7
ggtttaacctcattgatctgatacacaatattgaagtaacgcaaggctttatgccaagcttaattactcatcaagagtggccttatggccgtacataaaatcccgtgttgttacaaaacagcacgggatttctttttatt

SEQ ID NO: 165 - DNA, 145 bp, Leuconostoc pseudomesenteroides 4882
gtatagaaaccattgatctgacatacaaagttgaagtaacgcaaggcgtcagccaagcttattgactctttacgagtggccctatggccgtacataaaatcccgtgttgcctttgcaacacgggatttatctttattcatccttt

SEQ ID NO: 166 - DNA, 143 bp, Oenococcus kitaharae DSM 17330
gggttctacctcattgatctgacacacagcattgaagtaaagcaagattaatttcaagcttaattttcttcacattttatgtgcagaagggcttatgcccacaatacataaaaagtccgcattcacttgcggacttttatttt

SEQ ID NO: 167 - DNA, 143 bp, Pediococcus inopinatus DSM 20285
tattttaactatattgatttgacgctctgagttaaaatcaaacaaagcttcggctgagttttatcttttgaggccgctatcggcccatacatattttattcaagaaaagctattgacggttatcaaaccaccaatagcttttt

SEQ ID NO: 168 - DNA, 140 bp, Pediococcus lolii DSM 19927
acttttaaccttattgatttaacatcctgatttgaaatcaaacaatgcactttgtgcggagtttatccatttgtcccagctatctgggcaatacatagtgaaagaggaaccgacccttaatgggacggctcctctttttt

SEQ ID NO: 169 - DNA, 140 bp, Pediococcus parvulus DSM 20332 A; identical to SEQ ID NO: 168

SEQ ID NO: 170 - DNA, 149 bp, Pediococcus parvulus DSM 20332 B
tattttaactatattgatttgacgctctgggttaaaatcaaacaaagctttatgctgagttttatcttttgagtccgctatcggaccatacataattttattaagaaaagctattgaaggttattaaaccgacaatagcttttcttttt

SEQ ID NO: 171 - DNA, 137 bp, Pediococcus stilesii DSM 18001
acaattgaatttacttctttaacatcctaatttgaaatcaagcaatgcacttcggtgcggagtttacacatttgtcgtctttataggcgcgtacataaagaaaagaggaacgttccttaatggaagttcctcttttt

SEQ ID NO: 172 - DNA, 119 bp, Steptococcus agalactiae GB00300
ttgttggaactattcgaaacagcacagcgcgttaaaataaggcagtgattttttaatccagtccgtattcagcttgaaaaagtgagcaccgattcggtgcttttttttatgtcattgtt

SEQ ID NO: 173 - DNA, 119 bp, Steptococcus gallolyticus ATCC BAA-2069
ttgttggagctattcgaaacaacacagcgagttaaaataaggctttgtccgtacacaacttgtaaaagtggcacccgattcgggtgcgtttttttgtgcccttacaaataatttcaaca

SEQ ID NO: 174 - DNA, 102 bp, Steptococcus henryi DSM 19005
cttgcacagttacttaaatcttgctgagcctacaaagataaggcttcatgccgaaatcaagcacccccgtttttaacgaggggtgcttttcgttatgtaaaa

SEQ ID NO: 175 - DNA, 110 bp, Steptococcus mutans NLML5
cttacacagttacttaaatcttgcagaagctacaaagataaggcttcatgccgaaatcaacaccctatctattataagatagggtgttttcgttttatagaggagatttt

SEQ ID NO: 176 - DNA, 119 bp, Steptococcus oralis SK304
ttgttggaactattcgaaacaacacagcaagttaaaataaggctttgtccgtacacaacttgaaaaagtgcgcaccgattcggtgctttttattttattatactaactcattgtactcc

SEQ ID NO: 177 - DNA, 105 bp, Streptococcus anginosus 1_2_62CV
cttacacagttacttaaatcttgcagaagctacaaagataaggcttcatgccgaaatcaacaccctgtctatgacggggtgttttcgtgttgtaaaggagttttt

SEQ ID NO: 178 - DNA, 119 bp, Streptococcus anginosus DSM 20563
atgttggaatcattcgaaacaacacagcaagttaaaataaggctttgtccgtactcaacttaaaaagtgcgcaccgattcggtgcttttttatttcaatcaagaacacaaaaaaacagc

SEQ ID NO: 179 - DNA, 119 bp, Streptococcus dysagalactiae subsp equisimilis
ttgttggaaccattcaaaacaacgtagcaagttaaaataaggctagtccgttatcaacttgaaaaagtggcaccgagtcggtgctttttgtatctttattttaccttgtcaataaacta

SEQ ID NO: 180 - DNA, 119 bp, Streptococcus equi subsp zooepidemicus
cctatggaactattcaatacagcatagcaaagttaaaataaggctttgtccgtaatcaacctgaaaaggggagcaccgaatcggtgcttttttactttctaccaactctaccaatactt

SEQ ID NO: 181 - DNA, 99 bp, Streptococcus gordonii Challis substr CH1
cttacacagttacttaaatcttgcagaagctacaaagataaggcttcatgccgaattcaacaccctgtcatttatggcggggtgttttcgatttgtaaa

SEQ ID NO: 182 - DNA, 109 bp, Streptococcus infantarius subsp infantarius
cttgcacggttacttaaatcttgcagagcctacaaagataaggcttcatgccgaattcaagcaccccatgtttacatggggtgcttttcgttgtgtaaaaaggagagta

SEQ ID NO: 183 - DNA, 106 bp, Streptococcus intermedius B196
cttacacagttacttaaatcttgcagaagctacaaagataaggcttcatgccgaaatcaacaccctgtctatgacggggtgttttcgtgttgtaaaggagttttta

SEQ ID NO: 184 - DNA, 119 bp, Streptococcus lutetiensis 033
ttgttggaactattcgaaacaacacagtgagttaaaataaggctttgtccgtacacaacttataaaagtggcacccgattcggatgcattttttatttgtgattcaaatagatataaca

SEQ ID NO: 185 - DNA, 119 bp, Streptococcus mitis SK321
tcgttggaactattcgaaacaacacagcaaagttaaaataaggctttgtccgtacacaacttgaaaaagtgcgcaccgattcggtgcttttttgttttactatactaatttattctact

SEQ ID NO: 186 - DNA, 119 bp, Streptococcus mutans TA 159
gtgttggaatcattcgaaacaacacagcaagttaaaataaggcagtgatttttaatccagtccgtacacaacttgaaaaagtgcgcaccgattcggtgcttttttatttgctttactgt

SEQ ID NO: 187 - DNA, 100 bp, Streptococcus orisratti DSM 15617
cttgcacagttacttaaatcttgcagagcctacaaagataaggctttatgccgaaatcaagcaccccgtttatacgaggtgcttttcgttttaaataaaa

SEQ ID NO: 188 - DNA, 99 bp, Streptococcus parasanguinis F0449
cttacacagttacttaaatcttgcagaagctacaaagataaggcttcatgccgaattcaacaccctgtcatttatggcggggtgttttcgttttgtaaa

SEQ ID NO: 189 - DNA, 119 bp, Streptococcus salivarius K12
ggtttgaaaccattcgaaacaatacagcaaagttaaaataaggcttagtccgtattcaacttgagaaagtggcaccgattcggtgcttttttgctgcacaaagagtcccttggaattat

SEQ ID NO: 190 - DNA, 119 bp, Streptococcus sanguinis SK330
ttgttggaactattcgaaacaacacagcaagttaaaataaggctttgtccgtacacaacttgaaaaagtgcgcaccgattcggtgcttttttaattactacaggtgcttttttaattac

SEQ ID NO: 191 - DNA, 102 bp, Streptococcus vestibularis ATCC 49124
cttacacagttacttaaatcttgcagaagctacaaagataaggcttcatgccgaaatcaacaccctgtcattttatggcagggtgttttcgttatttaaaaa

SEQ ID NO: 192 - DNA, 98 bp, Lactobacillus composti DSM 18527
aatcttgaatctattgatctgacatacagcgtcagaataaaacaaggccatcggccaagtttacagcgctctttttgagagtggggcttatgcccata

SEQ ID NO: 193 - DNA, 67 bp, Lactobacillus concavus DSM 17758
tatcttaactttattgaaatgacactctgttaaaatcaaacaaggcttcggccaagttttccctttt

SEQ ID NO: 194 - protein, 1239 aa, Bifidobacterium bombi
MSQHRRYRIGIDVGLNSVGLAAVEIDANHDNPLDEIPISILNAQSVIHDGGVDPDEAKSATSRRASAGVARRTRRLHKSKRQRLAKLDEVLNELGYPVEDESQFPAGSNPYIAWQVRAKLAETFIPDVETRKRMISIAIRHIARHRGWRNPYSSVADAERMSHTPSPFMVEYAKKLDFEINDRRTNGFYHSPWQSVDEEGKRLSKSELEKQPKIEDWNDNPINGKTIAQLVVSSLEPQTKIRRDLTHGLQTESTLNIQTEKLHQSDYIHELETIFERQHVDQTTQEQLLEATFHTKNPKAVGAAAKLVGKDALDSRYYRASRATPAFEEYRVMAAIDTLRIREHGTERQLTTDERRKLFDFIKGLPSKKTKNEPSISSLTWGDVADFLGIQRIDLRGLGSLKDGEPVSAKQPPVIETNDIMQKAPDPIAAWWSQANTKERDRFVEFMSNAGAIKDTSDEVRNIDAEISQLLEELTGSELESLDKITLTSGRAAYSSQTLRNITNYMYETGCDLTTARQELYHVGKNWAPPAPPIYEHTGNPSVDRTFSIIHRWLCNMRDQYGEPETVNIEYVRDGFSSTSTQLAEQRERDRRYADNLKMLSNYEGASSRSDVRRIKALQRQNCQCIYCGRTITFETCQMDHVLPRKGPGSDSKFENLVATCGECNKSKSDTLYMNWAKTYPNTNLQDVLRRIQEWSKDGWMTDKRWRQYKEALILRLEATEKQEPLDNRSMESVSYMARELRNRIYGFYGWHDQDDALKQGRQRVFVSSGSMTAAARRTPFESPLIKGADEETYESSLPWLDGMKGKTRLDRRHHAVDASIIAMMRPQIVKILTEAQEIRSEQHDKYRKGQTPDYVCKRRDYWRNWRGTPDTRDEEVFNYWAGEQLRTLTDLVSQKMADDEIPVIYPTRLRLGNGSAHKDTVVSMMTRKVGDELSITAINKAESGALYTALTRDSDFDWKTGLSANPNRRIRVHDKWFEADDTIKFLEPAVEVVLKNNTRARIDPEALDKVHSTLYVPVRGGIAEAGNSIHHVRFYKIPKLNSKGKQTGSIYAMLRVLTIDLAMNQYDKETGKKQDLFTLPLPESSLSRRFSEPKLRQALIDGTAEYLGWAVVDDELEIPAFANARITEEQAINGSFTDRLLHSFPGTHKFRFAGFSRNTEIAIRPVQLASEGLIETDENRKRQQLRLTQPNTEYSNSIKNVLKSGLHLKVNTLFQTGILVTRANSQGKQSIRFSTVEE

SEQ ID NO: 195 - protein, 1121 aa, Bifidobacterium dentium LMG 11045
MSVGLAAIEVDETGFPIRILNIQSVIHDGGIDPQLGKKKSISRKAISGVARRTRRMRRRKVVRLRQLDATLESLGFPIVEPDSLDTWEIWLTRAKLASSYIQDDETRKEDVSIALRHIARHRGWRNPYSNVESLFVDVAPSEQYEELRRKAEEKLGTSLSGNPTSAEIVECILKRQVGEVQLRTRSRKGVNGNAVEKEGLLPTKLMQSDNAAEIRRIFKVQRIDDETGRKLLRAVFKACSPKGSVERRVGRDALAPGLPRALKASLAFQEYRIANVLTNLVISEDGTKRKLTIAEKQRVFGFLSSNETDDITWIDVAEKLGLERRQIQGVGCLTADGEERISSTPPRNITALHIHSAKPVIREKLVAWWKAASPTVRETMVELLSNTVDIDRVREDMDYSSAVAFIDSLGDEELTALDSVDLLSGRAAYSRQTLKQLTERMLNTDDDLHEARKAVFGVDDNWKPPVDAISTSVGNPAVDRVLKIVNRYLLACQKRWRNPQSVQIEHVRESFSSVAKAKETERVQGERARYRNDLRRELCEQEGLNKIRESDIRRWESVQRQNGTCLYCGSPITFRTCEMDHIVPRKGVGSTNTRVNLAAACAACNKLKSNTAFSVWARTEGAANRKVSQRDAIERVKTFIFNKSVPPREQRAFKQAVISRLRQAESDPAIDNRSIESVAWMADELHRRIEAYFNQDADVSGNTPATQVWVFQGRVTALARKASGIEGRIHFAGEWKKTRLDRRHHAVDAAVIAMMNHSAAQTLVERDSLRLSQWITRKPETWKNYPFSEGQKKTRFKEWLDCMNALLDLLNDALDSDRVPVTRCQRMSLGNSQAHAATIRKMKRVELFSPMDADLIRRASTPALYCALTRLPEYSPEKGLPENRGREIVLNGRHIRSTETVDFFASGAAQLMVRNGSAEIGDSIHHMRIYRYRKTGAKSQEYVYGMIRVFQIDLLHASSENLFAVQLPSQSVSVRYGDKNVVQAIQEGRAEYLGHIVPNDEILISYEGVRMKDSEKIGAYANDFSGTASELAQRRHWVVVGSDVSKLALRPSYLSEEGLENSGSESERLSKQTRKVIEGKGWVVAVNILAKYHPVVIRRNALGEPRFRTNSGMPVSWRWDR

SEQ ID NO: 196 - protein, 1390 aa, Bifidobacterium merycicum LMG 11341
MSRKNIVEDYAISLDIGNASVGWVAFTPNYRLVRAKGHELIGARLFEPASTAEERRMARTTRRRYSRRRWRLRMLDSMFDQALSEVDPSFLMRRKYSWVHPEDKNNEAHWFGGVLFDSNEQDKRFYEKYPTIYHLRKSLMEDDERHDIREVYLAIHHMMKYRGNFLTEGELAPSSVFDVEDFLKLLTEILQYADEGETDEDLELQADANGLTEALCTTKGSRSIRAKNAISILKEGAALSKRQEAIISAVFAGLEGNKLDLTKVFPNKEYTPEDKKTLALYFNKADYDEKRVAIGDSGLLEDNECDFLDCIRRQYSAIALKQLLGDFTSISESMCARYEQHQRNWDLIKRYCREESNAENINKNYGALVGWEIVGGQRRSIRGAKDYENKRKAANKFFEELIKGSALPDQEKERLLHDIENDELFPVQRDSGNGVIPYQLHLNELKKIIQKQGRYYPFLLETYIKDGKEVNKLEGLLAFRVPYYVGPLVSRDDMQSSDNRENHWMIRRKKGVITPWNFDEMVDKDKSGHEFIKSLVGTDSYLLGETTLPKNSLLYQEFEVLNELNNVRLSIRTGNHWADKRRVRLGHNEKKLLLEELFAKQATVTKKAAENLLRRTYGNTYEISGLADEKKFVSSLSSYGKMCRTLKASYVNSHKDVVEKIIELQTVFEDKKTLKHQLQLLGELAETNCELLSNTHYTGWGKLSRKLLTSKVVVCKIGNDFAPAKHSIIEIMRETDRNFMEIITDKDLGVGEWINQQNVGAEDGNSYQDIIDDLRVSPKVKRGINQAIRVIDDISKAVGKEPSRIFLELAGDVQQSARTVSRKSRLQGLYKSAGLQKEFRDLAESLNECSDNDLRDDRLFLYYTQLGKDMYTGEPLNLDRLSSDYDIDHIIPQAVTQNDSLDNRVLVARVANARKTDSFQYLPEIANRMRNFWQELLDAGLISRVKFDRLNRQNDFSSHEKERFVQRSLVETRQIMKNVATIMRKRYGNSAAVIGLNSELTKEMRQYLGFSHKNRDINDYHHAQDALCLGIAGQFAVNRGFFANGMVSDGAVNSYNLYLQDYLRGYREKMSAGERRRNKAFGFIVGSMNSQDSDKRINPKTGEIAWDDEDKVYLRKVMNYRKMLITQKVGDSFGALYNETRYGTSAKEGVNGIPFDKHKQDTALYGGFSSAKTVYVVLIEAKKKTRLVNITMQEYAELGDHPSDDALRAVLAKKKPEYGKARILLRHIPPMQLIRYGGALVTVKSATELNNAQQLWLPYKEYCLFDDVISSAIDVDEARLCQMLDVILDAIQKYYPKQRFDETGLSAFHNAFNEVSAEDKKRIVGEMVGMLHADAKNANLKALGMSGRWGRMSNQSGYTFADSDEFIFQSPSGLFEKRISVGELKKRRAR

SEQ ID NO: 197 - protein, 1344 aa, Kandleria vitulina DSM 20405
MSQNNNKIYNIGLDIGDASVGWAVVDEHYNLLKRHGKHMWGSRLFTQANTAVERRSSRSTRRRYNKRRERIRLLREIMEDMVLDVDPTFFIRLANVSFLDQEDKKDYLKENYHSNYNLFIDKDFNDKTYYDKYPTIYHLRKHLCESKEKEDPRLIYLALHHIVKYRGNFLYEGQKFSMDVSNIEDKMIDVLRQFNEINLFEYVEDRKKIDEVLNVLKEPLSKKHKAEKAFALFDTTKDNKAAYKELCAALAGNKFNVTKMLKEAELHDEDEKDISFKFSDATFDDAFVEKQPLLGDCVEFIDLLHDIYSWVELQNILGSAHTSEPSISAAMIQRYEDHKNDLKLLKDVIRKYLPKKYFEVFRDEKSKKNNYCNYINHPSKTPVDEFYKYIKKLIEKIDDPDVKTILNKIELESFMLKQNSRTNGAVPYQMQLDELNKILENQSVYYSDLKDNEDKIRSILTFRIPYYFGPLNITKDRQFDWIIKKEGKENERILPWNANEIVDVDKTADEFIKRMRNFCTYFPDEPVMAKNSLTVSKYEVLNEINKLRINDHLIKRDMKDKMLHTLFMDHKSISANAMKKWLVKNQYFSNTDDIKIEGFQKENACSTSLTPWIDFTKIFGKINESNYDFIEKIIYDVTVFEDKKILRRRLKKEYDLDEEKIKKILKLKYSGWSRLSKKLLSGIKTKYKDSTRTPETVLEVMERTNMNLMQVINDEKLGFKKTIDDANSTSVSGKFSYAEVQELAGSPAIKRGIWQALLIVDEIKKIMKHEPAHVYIEFARNEDEKERKDSFVNQMLKLYKDYDFEDETEKEANKHLKGEDAKSKIRSERLKLYYTQMGKCMYTGKSLDIDRLDTYQVDHIVPQSLLKDDSIDNKVLVLSSENQRKLDDLVIPSSIRNKMYGFWEKLFNNKIISPKKFYSLIKTEFNEKDQERFINRQIVETRQITKHVAQIIDNHYENTKVVTVRADLSHQFRERYHIYKNRDINDFHHAHDAYIATILGTYIGHRFESLDAKYIYGEYKRIFRNQKNKGKEMKKNNDGFILNSMRNIYADKDTGEIVWDPNYIDRIKKCFYYKDCFVTKKLEENNGTFFNVTVLPNDTNSDKDNTLATVPVNKYRSNVNKYGGFSGVNSFIVAIKGKKKKGKKVIEVNKLTGIPLMYKNADEEIKINYLKQAEDLEEVQIGKEILKNQLIEKDGGLYYIVAPTEIINAKQLILNESQTKLVCEIYKAMKYKNYDNLDSEKIIDLYRLLINKMELYYPEYRKQLVKKFEDRYEQLKVISIEEKCNIIKQILATLHCNSSIGKIMYSDFKISTTIGRLNGRTISLDDISFIAESPTGMYSKKYKL

SEQ ID NO: 198 - protein, 1352 aa, Lactobacillus agilis DSM 20509
MSEKEYHLGLDIGTNSIGYAVMDCNYHLMRAKGKTLIGTSLFREGNTAAERRGYRTTQRRLKRRKRRLKLLEAFFDPYIFEVDENFLARLHEADISPKDENKRFWGSLLFPNEKDANFYRKYPTIYHLRKALMEEDRKFDVRAIFLAIHHIMKYRGNFLSPLSVDSFKQEGLELKEQLDRQLKRVAELYNELNTDVKINVSDVETIQDIIIDKNKSRRDKAGALKKLLAVSSDRKEINKLNASLAKELSNAILGMKAQFANLLLADDLEIDKNKKNFSLLDTNAEENVSGLLELVNEKQAELFDAIKTIHDQIILNEIVPDGKSISQSMVDKYEAHREQLQVLKALYEKMDAKQIKAIKKAYSLYIDGKDPKAKKVDKRAHQNRADFYKEVKKVLVELDDSRAEKLLGLIEMGQFLPKQRTAMNGVIPNQLHQVELDKIIEMQSKYYPWLAEKNPVKSHQKRAPYKLDELLTFRVPYYVGPMVTSKKQQQTSNSNFAWMVRKQEGEITPWNFEEKVDTIASANDFIKRMTAKDTYLVGEDVLPANSLLYQRYKVLNELNNIKVNGRRLPVELKREAYVALFENGDSKTVSAKCFKNWLNVKLKNLNSLKLEGLSTGTKFDNNLSTYHDLKKIFGKAVDDAGRQKDFEQIIEWLTIFEDKKILRIKLKEIEWLTEENITQLTRLNYNGWGRLSRRLLTGICDSNGQRIMDWLWDTTNNFMQIQSQPDFQKAIVEYNSDKLEQGDIEQILGEAYTSPQNKKAIRKVIKVVQDVEKAMGAKPTSISIEFTRSDGRSELTNSRMTQLQKTLMSLSEEMTDQALLAEFKDFQASKKKLTNKYYLYFTQLGRDMYTGEPLNIDQLSLYSDGDHILPRSFIKDDSLDNRVLTKRAVNNEKSDTVPVCEYGAKMKDFWNDLYDNGLISKQKLANLLTDPDEIGPYKANGFIRRQLVETSQVIKLSAEILQTLYQDTKIIEVRQKYTHELREHFNFVKIRQLNDYHHAFDAYLTAFSGRYLYQRYPKLRGYFVYGDYNKFDAKKDRNYLKSYNFLYDLEEGKTDQIVDNVEHKVFMNRQDAINQLKKAYEYKYMLVSQETYTNSGAMFKETIYPVNPKQKLIQKKNDKPVDIYGGYSNNYDAYLSIVRLEDKKGIKFRVVGIPMRNKAELDNLAKEDHNGYMQRLNEIVDEQINSSGKKKTFRIILPKVHFKQLVEDDSGKFMLGSAAYPYNAKQLVLSVKSIESLANKDASDRELVAVYEEILNVVNDKFTLYDARQFRNKLTSSKDKFVELNTADKVTELLDILDGLHANPVVKKLKIISGSPFGFLQRPSGIVLTENAKLIYQSPTGIFERVVYLRDL

SEQ ID NO: 199 - protein, 1318 aa, Lactobacillus animalis DSM 20602
MGSNMLKKDYSIGLDIGTNSVGHAVVTDDYKVPTKKMKVFGDTSKKTIKKNMLGVLLFNEGQTAADTRLKRGTRRRYTRRKNRLRYLQEIFAPELAKVDPNFLYRLEESSLVAEDKKYDVYPIFGKREEELLYHDTYKTIYHLRSALANNDQPADLRLVYLALAHIIKYRGNFLLEGEIDLRTTDINKVFAEFSETLNENSDENLGKLDVADIFKNNTFSKTKKSEELLKLSGAKKNQLAHQLFKMMVGNMGSFKKVLGTDEEHKLSFGKDTYEDDLNDLLAEAGDQYLDIFVAAKKVYDAAILASILDVKDTQTKTVFSQAMIERYEEHQKDLIELKRVFKKYLPEKCHDFFSEPKISGYAGYIDGKVSEEDFYKYTKKTLKGIPETEEILQKIDANNYLRKQRTFDNGAIPHQVHLKELVAIVENQGKYYPFLRENKDKFEKILNFRIPYYVGPLARGNSKFAWLTRAGEGKITPYNFDEMIDKETSAEDFIKHMTINDLYLPTEPVLPKHSLLYERYTIFNELAGVRYVTENGEAKYFDAQTKRSIFELFKLDRKVSEKMVIKHLKVVMPAIRIQALKGLDNGKFNASYGTYKDLVDMGVAPELLNDEVNSEKWEDIIKTLTIFEGRKLIKRRLENYRDFLGEDILRKLSRKKYTGWGRLSAKLLDGIYDKKTHKTILDCLMTEDYSQNFMQLINDDNYSFKETIKNAQVIEKEETLAKTVQELPGSPAIKKGILQSLEIVDEIIKVMGYKPKSIVVEMARETQKTHGTRKREDRVQQIVENLKDANELPEKLPSNAELSDERKYLYCLQNGRDMYTGAPLDYDHLQFYDVDHIIPQSFLKDDSIENKVLTIKKENVRKTNGLPSEAVIQKMGSFWKKLLDAGAMTNKKYDNLRRNLHGGLNEKLKERFIERQLVETRQITKYVAQLLDQRLNYDGNGVELDEKIAIVTLKAQLASQFRSEFKLRKVRALNNLHHAHDAYLNAIVANLIMAKYPELEPEFVYGKYRKAKFKGLGKATAKNTLYANVLYFLKENEVYPFWDKARDLPTIKRYLYRAQVNKVRKAERQIGGFSDEMLVPKSDSGKLLPRKEGLDPVKYGGYAKAVESYAVLITADEVKKGKTKKVKTLVNIPIIDSKKYEADPTAYLASRGYTNVTNSFILPKYSLLEDPEGRRRYLASFKEFQKANELILPQHLVELLYWVNAKDGEQKLEDHKAEFKELFDKIMEFADKYVVAPKNSEKIRRLYEENQDATPMELGKNFVELLRYTADGAASDFKFFGENIPRKRYNSAGSLLNGTLIYQSKTGLYETRIDLGKL

SEQ ID NO: 200 - protein, 1316 aa, Lactobacillus apodemi DSM 16634
MLQKNYTIGLDIGTNSVGYAVINDNYKVPAKKMKVLGNTDKKTIKKNLMGVLLFDAGETAATTRLKRGTRRRYTRRRNRLRYLQEILGPELAKVDANFLHRLAESSLVTEDKEFSAYPIFGDREEELLYHKTYKTIYHLRSALANKDEKADLRLIYLALAHIIKYRGNFLIEGEIELSDTDIDKVYADFCRSFNELFDTEVLQEIEVEAIFKDKTLSKTKKAEELVKVSGVKKNQVAHQFLKMMVGNTVNFKKVFNLTEDQKLSFGTDSYEDELNDLLAKSDDRYLDVFVAAKKVYDTAILANILNTKNSVATKTIFSQSMIERFKDHQKDLKELKQLFKTYLPEKYPDFFGNSKEDGYAGYIEGKTNEEKFYTHTKKILKNIPQAASVLAQIDVGNYLRKQRTFDNGVIPHQIQLKELLAIIENQGKYYPFLLENKEKIAKILTFRIPYYVGPLARGNSRFAWLKRVGKEKITPFNFENVVDLESSAERFIERMTLNDLYLPEEKVLPKHSMLYEKFSIFNELAGIRYITDNGEMKFLDAQTKQSIFELFKQERTVKEKKVLDLLKTLMPSERVVAIKGIDNGKFNASFGTYHDLSKMGFKTEKIASESNQARWEEIIKTLTIFEDRKLIKSRLRKYDDFLNEKEIGALSKRKYTGWGRLSAKLIDGIYDKKTHQTILDFLMNEDYNQNFMQLISNDNYSFKKIIEDSQVIKEEGSLTEVIQELPGSPAIKKGILQSIEIVDELVKVMGGNPKKIVVEMARETQKTHGTTRREARIKEIIKNLNKLKLNELPKDLPSNEELSDEKVYLYCLQNGRDMYTGAPLDLDNLSQYEVDHIIPQSFLKDDSIENKVLTAKIENSRKTNGLPSVEIAKKMGAFWRSLLKVGAISEKKYRNLRRSLHGGMTEKLKETFVKRQLVETRQITKYVAQILNSRFNEEKNEDKVAIVTLKAQLTSQFRKDFELYKVREINNLHHAHDAYLNAVLATLLMTSFPELEPEFVYGKYRKTKFKGLGKATAKNNLYTNILQLLKEESAQYWDTKERDLATIKKNVYQAQVNKVRKVERQTGSFYDETVAKKSASQKLFPRKNGLDPVKYGGYQRANEGYSLLFRADMLNKRGKTKSVKTLVKIPIIESAQYLADPTEYLAKRGYYNVSEHSLLLPKFSLLENNNGLRRYLASSNEFQKANELILPKHLVRLLYWSQSKQRKEELNKHRAEFAELFTYIMDFADKYVVAPKNSEKIKNIYENNKDSSVEVLGKNFIELLKYTADGAASDFTFFDTKIPRKRYNSAGDLLDGTLIYQSKTGLYETRIDLGAI

SEQ ID NO: 201 - protein, 1377 aa, Lactobacillus brevis subsp gravensis ATCC 27305
MESNHDGEQVKYTLGLDIGTSSIGYAAIDKHQKPIRAKGKHVIGVRLFQEGQTAADRRAFRTTRRRLKRRKWRLNLLNRLFDPYLSEVDPNFLPRLRQSNLSPKDDNKHFNGSTLFPDKTDAAFYRQYPTMYHLRYALMTEKRKFDIREVYLAIHHIVKYRGNFLNSATVDSFKTSNIDFTSQFDRLNELYRQVILDEPFQINMDQVDEMTNKLLDNDALKLDTQKQVAKLLPVIYNDKPIDKQYTRIATEFSKAILGYKTKLDVILNLDTQNAKDWVIRLDDEDIDDKLPALVENLDESRQEIVTIIRDLYAQITLNAIVPKGKSLSESMVDKYNDHKDHLDLLMGLIHELGDDSAKGIKLREAYTQYVGKSDDKTLNQDDFYAAIKKNLDEDSKRSPKIQRLIEQASFMPKQRTSANGVIPHQLHQLELDRIIENQGRYYPFLKKPNPNTHKPNGGKYKLDELVAFRIPYYVGPLITKRDQEKTSGADFAWMIRKPGQEGEITPWNFDQKVDRMASANRFIRRMTTKDSYLVAEDVLPDASLIYEKFKALNELNMLKVNDSRLSPSQKQDLFNNLFKKQKTIRTKKLQTYIRTNWELPSVMISGLADPDKFNSSLSTYIDFRDIFGEKVDDPNRQADYEEIIEWSTVFEDRKIYQAKLNQLDWLTEPQRKALLTKRYTGWGRLSKKLLTGLKDQNGDSILDQLWKTNDNFMQIQSRDEFAKQIHDENAKQFHEANNVDDILDDAFTSPQNKKAIRQVDKVVQDVVKAVGYAPDKIAIEFTRSLENNPQRTVSRQRQLQAAYKNIPREIMKSGLMAELGSVADSKKVLSDKLYLYFTQMGKDMYEDKTINIDNLPNYDIDHILPQAFIKDDSIDNRVLISKEENARKSNRVPLKFFGAKRMGFWKDLLNNGLISNRKFQNLTTDPEKISKYSAKGFIHRQLVETSQVIRLVANILGNEYSQAGTTIIEVSAKMNRQLREDFHLIKNRNVNDYHHAMDAYLTAYVGDYLYLRYPKLRPYFVYGDFKKAEDQDLNIRNFNFLHDLKDNESLDKIVDSETGEIVWEKHGSVKQLKKVYHYKFMLVSQEVYTRQDALFNQTIYPASDADKRKLIPIKNSKPVDVYGGYSGNIDAYMAIVRVHGKKEDNYKVVGIPMRAVTKLKKAEKEGHDSYLNAVHEVLKPQFTKKKKNRKTGEITETVDEFDVLLGKVYYRQLIVDGNKKFMLGSSSYQYNAKQLVLSDKAMQVLSKNGKVKSQDENQNLIDVYDEILEKVDQYFELYDQRHYRESLHKGRGIFVNLPLSNQYDGSKLTSYGKYETIDAILNGLHANATMSNLRYLGISSPFGKMQASNGLTIDPDSIICYQSPTGLFERQIKLSDL

SEQ ID NO: 202 - protein, 1381 aa, Lactobacillus buchneri DSM 20057
IEGIKVESNHDGEQVKYTLGLDIGTSSIGYAAIDKHQKPIRAKGKHVIGVRLFQEGKTAADRRAFRTTRRRLKRRKWRLNLLNRLFDPYLSEVDPNFLPRLKSNLSPKDDNKHFDGSTLFPDKTDAAFYRQYPTMYHLRYALMTEKRKFDIREVYLAIHHIVKYRGNFLNSATVDSFKTSNIDFTSQFDRLNELYRQVILEEPFQINMNQVDKMTNKLLDNDALKLDTQKQVAKLLPVIYNDKPVDKQYTRLATEFSKAILGYKTKLDVILNLDTQNAKDWAIRLDDEDIDDKLPALVENLDESRQEIVTIIRDLYAQITLNAIVPKGKSLSESMVDKYNDHKDHLDLLMGLIHELGDDSAKGIKLREAYTQYVGKSGDKTLNQDDFYAAIKKNLDEDSKRSPKIQRLIEQASFMPKQRTSANGVIPHQLHQLELDRIIENQGRYYPFLKEPNSNTHKPNGGKYKLDELVAFRIPYYVGPLITKQDQEKTSGADFAWMIRKPGQGGEITPWNFDQEVDRMASANTFIRRMTTKDSYLVAEDVLPDSSLIYEKFKVLNELNMLKVNDRRLSISQKQDLFNNLFKKQKTIRTKKLQTYIRTKWELPSVMISGLSDPDKFNSSLATYIDFRDVFGEKVDDPNRQADYEKIIEWSTVFEDRKIYQAKLNQLDWLTESQSKALLTKHYTGWGRLSKKLLTGLKDQNGDSILDQLWKTNDNFMQIQSRDEFAKQIHDENAKQFHEANNVDDILDDAFTSPQNKKAIRQVDKVVQDVVKAVGYAPDKIAIEFTRSPQDRPQRTFSRQRQLQSTYLNVAKALMKSNLNQELKSVIDSQQTLTDKLYLYFTQLGQDMYTGKEINFDELVNYQIDHILPQAFIKDDSLDNRVLVSAPINNAKSDNVPVKKFGAKMGYFWKQLAENHLISKRKLNNLTTDPDKIGKFTAQGFIHRQLVETSQVIRLVANILGNEYGHDGTTIIEVTAKMNHQMRKDFDLIKIRDVNDYHHAMDAYLTAYVGDYLYLRYPKLRSYFVYGDFKKLKDQSLKIRNFNFLHDLTNDEAGDKIVDQETGEIIWDKHESVKQLKKVYHYKFMLVSQEVYTRQDALFNQTIYPASDADKRKLIPIKNNKPVDVYGGYSGNVDAYMAIVRIHGKKEDKYKVVGVPMRAVADLKKAESKGRDNYLNAVHEVLKPQFTKKKKDRKTGEITEMMDDFDVLLGKVYYRQLIVDGNKKFMLGSSTYQYNAKQLVLSDKAMQVLSKDDKLKNQDENQNLIDVYDEILEKVDQYFELYDINKFRQKLHDGRKKFIELPVDNDFNGKKLISYGKRATIISILNGLHANATMSNLKYLGISSPFGMLQVPNGIILSPASRICYQSPTGLFERKVKLSDL

SEQ ID NO: 203 - protein, 1371 aa, Lactobacillus buchneri CD034
MKVNNYHIGLDIGTSSIGWVAIGKDGKPLRVKGKTAIGARLFQEGNPAADRRMFRTTRRRLSRRKWRLKLLEEIFDPYITPVDSTFFARLKQSNLSPKDSRKEFKGSMLFPDLTDMQYHKNYPTIYHLRHALMTQDKKFDIRMVYLAIHHIVKYRGNFLNSTPVDSFKASKVDFVDQFKKLNELYAAINPEESFKINLANSEDIGHQFLDPSIRKFDKKKQIPKIVPVMMNDKVTDRLNGKIASEIIHAILGYKAKLDVVLQCTPVDSKPWALKFDDEDIDAKLEKILPEMDENQQSIVAILQNLYSQVTLNQIVPNGMSLSESMIEKYNDHHDHLKLYKKLIDQLADPKKKAVLKKAYSQYVGDDGKVIEQAEFWSSVKKNLDDSELSKQIMDLIDAEKFMPKQRTSQNGVIPHQLHQRELDEIIEHQSKYYPWLVEINPNKHDLHLAKYKIEQLVAFRVPYYVGPMITPKDQAESAETVFSWMERKGTETGQITPWNFDEKVDRKASANRFIKRMTTKDTYLIGEDVLPDESLLYEKFKVLNELNMVRVNGKLLKVADKQAIFQDLFENYKHVSVKKLQNYIKAKTGLPSDPEISGLSDPEHFNNSLGTYNDFKKLFGSKVDEPDLQDDFEKIVEWSTVFEDKKILREKLNEITWLSDQQKDVLESSRYQGWGRLSKKLLTGIVNDQGERIIDKLWNTNKNFMQIQSDDDFAKRIHEANADQMQAVDVEDVLADAYTSPQNKKAIRQVVKVVDDIQKAMGGVAPKYISIEFTRSEDRNPRRTISRQRQLENTLKDTAKSLAKSINPELLSELDNAAKSKKGLTDRLYLYFTQLGKDIYTGEPINIDELNKYDIDHILPQAFIKDNSLDNRVLVLTAVNNGKSDNVPLRMFGAKMGHFWKQLAEAGLISKRKLKNLQTDPDTISKYAMHGFIRRQLVETSQVIKLVANILGDKYRNDDTKIIEITARMNHQMRDEFGFIKNREINDYHHAFDAYLTAFLGRYLYHRYIKLRPYFVYGDFKKFREDKVTMRNFNFLHDLTDDTQEKIADAETGEVIWDRENSIQQLKDVYHYKFMLISHEVYTLRGAMFNQTVYPASDAGKRKLIPVKADRPVNVYGGYSGSADAYMAIVRIHNKKGDKYRVVGVPMRALDRLDAAKNVSDADFDRALKDVLAPQLTKTKKSRKTGEITQVIEDFEIVLGKVMYRQLMIDGDKKFMLGSSTYQYNAKQLVLSDQSVKTLASKGRLDPLQESMDYNNVYTEILDKVNQYFSLYDMNKFRHKLNLGFSKFISFPNHNVLDGNTKVSSGKREILQEILNGLHANPTFGNLKDVGITTPFGQLQQPNGILLSDETKIRYQSPTGLFERTVSLKDL

SEQ ID NO: 204 - protein, 1171 aa, Lactobacillus cacaonum DSM 21116
MAKYSVGLDIGISSVGWAIIDIETKQIVNLGSRIFPSGNAAGNQERRGFRGIRRLIRRRKNRLTDLKKLLGETFFSDLKKIDSNGYEYYDIDFQINANPYELRVKGITEKLSKKELAVVLHHIIKHRGISYDLGDLEDDGTSGVSDYKNSININRQLLREKTVGQIQLERLIEFNQVHGQVKKAEDVSLLNVFPSSAYRDEANKIMIKQQEFYSEITNSFMEQVDQLVSRKRDYFIGPGNEKSRTDYGIYKSDGRTLDNLFAELIGTDKINGEKRASASSLTAQVYNLLNDLNNLHVSNTEDGKLTTSTKKEIIKAAKTTDGVFGISQICKIIGCKKEEITGFRQDKSEKKVIHTLAGYRKIRKALATINIEANELNPTVFDQIADILTLNTEKAEIRKQLDKVQLDITDEMKELVIDKNKDFLVDGRATWHSFSYQTLNMLIPELLNTSEEQMTILTRMGLMKSDNEKYRGLKKIPAEKIASEIFNPVVAKSTREAIKVFNAISKEIGKNNIEHVVIELPRDDNEEDEKRKIQKLQKANETEKEAADNLVKHKLGISDSALIAHYRKFKGLSQKVRYWYQQETYCPYCGKIIEATQLINNNDNFEVDHIIPISVSYDDSQNNKVLVHSQCNQAKEKQTPLGWINNGGGFGQSKNEYTNRVKNNKKYSKNKVDNLLNETDLTDIITQRSFIQRNLNDTRYAARTVLDEFYSFFKSNDLPTKVKVVRGKWTSQMRRKWNNVGGLRKTRDTHHHHAIDASIIASFPLLRAFDRAIKLIDVDKETGEIVQYGKASLNGDVIEEKSVIQAPIIKNEKFEKLVDEIYNFPLFKQVELANNIENPENPVKFSHHVDKKANRTVANQTIYSTRIKKTEKIVRKKVTAKEEEYVIGTIKDIYDVTNFEKFKKLYDESSKKDDIKFLMQKNDPKTWEKLVEIMNTYPDYEEISQLDGKVKRVKVSPFKLYFRENGFITKYAKHNNGPKVVSIKYYDSKLGNHIDITPVNANNKVILQSLKPWRTDVYYNNETQQYELLGLKYSDLKFTKGVYGITREAYEKLKYGYTDGVPAWKPISKESEFKFSLYRNDRVRIINEAGEKIDLLFGSRNETSEGYVEMKPIFKTNFDDAEEASFYGKTSNKRLIKKMARKGYQIYKVNTDILGNLYYTAKESNEPKLDL

SEQ ID NO: 205 - protein, 1362 aa, Lactobacillus casei str Zhang
MTKLGKPYGIGVDIGSNSIGFAAVDENSHLIRLKGKTVIGARLFEEGKAAAKRRAGRTTRRRLSRNRWRLSFLRDFFESHITPTDPNFFMRQKYSEISPKDKARYKYEKRLFNDRTDAEFYQQYSTMYHLRNRLMTDPSRADVREIYFAIHHILKSRGHFLTPGDAKDFNTNDVALDEIFPALQDAYAQVYPDLGITFDEDKANEFKTILLNEIATSIDTQRALVKLLLAEEDDKDILKQQKQVLTEFAKAVVGLKTKLNLALGTEVDSSEATAWNFSLGQLDDKWAGIESAMTDEGTEILDQIRDLYRARLLNGIVPTGKTLSQAKVDDYTQHHEDLQLFKAYLKQLEDDGTAKAIRQLYDRYIDGDDAAPFLRENFVKALTKDVTAHPNTKSPELLERLAQPDFMLKQRNKANGAIPVQMQQRELDQIIKNQAVYYDWLAAPNPVEKHRKSMPYQLDELLNFRIPYYVGPLVTAKEQKAAQGGVFAWMVRKDPEGNITPYNFDEKVDREASANTFIQRMKTTDTYLIGEDVLPKQSLLYQRYEVLNELNNVRVNNEKLSIEQKQQVIRELFERHNSVTIKQFAENLRAHGDYAHIPEIRGLADEKRFLSSLSTYRQLKSLLPEAIDDPAKQADIENIIAWSTVFEDAAIFKTKLKEISWLGSEAITKLSNIRYRGWGQFSRKFLNGLTLGNGHTIIQELLLSTNNLMQILTDETLQKKMTELNADKLKTANINDAIDNAYTSPSNKKALRQVLRVVDDIKRAADGQDPSWLYVETADGGGTPGKRTRARQHQLQEIYANAAHELIDTAVRGELEDKISDKADFNDRLVLYFMQGGRDIYTGAPLNIDQLSSYDIDHILPQSLIKDNSLDNRVLVHAIINREKNATFASTIYAQKMNATWRQWHEAGLISGRKLRNLQMRPDQIDKYASGFVARQLVETRQIIKLTEQIVAAQYPDTKIIAVKAGLSHQLREELEFPKNRDVNHYHHAFDAFLAARIGTYLLKRFPNLQAFFTYGKFTKADVKKLRGFNFIRDITHAEDKIVAKDTGEVVWDKQRDVDELDRIYNFKRMLITHEVRFETADLFKQTVYGARDSKEAGGSKQLIPKKKGYPVDIYGGYFRENTAYLAVVKVTKKTETIFKVVKIATSQVAALNKARSRSTAEELSVLTELLKPKFSKVGKNGKITDTPFEVVLPRVPREQLFYNAKYGFFMVNSDTMFHNFQEIWVSRSDQKILQQIRKAKIDYPNVDQDLDNLFHNLADQIVKYFDLYSIAGFKEKISQSQNTFNDLAVDDTDQSVGKITVINELLKGAQANGMTGSLKVLKISTPFGFTQDKSGVLTKDSSIIYQSPTGLFERSVRLTDL

SEQ ID NO: 206 - protein, 1395 aa, Lactobacillus ceti DSM 22408
MSKKYQNTKYYVGLDIGTSSVGWAVTDANYELLKVNGHKTWGSRLFTEAETALERRTHRATRRRLQRRKQRLDLLDELFAEELAKVDPQFLLRLKESQYHMEDKSTDDKYVLFNDQNRTDGEFFTEYPTIYHLRSELMQGKKEDIRAVYLALHHIVKYRGHFLLPGDNYDMQGNLSELIKRLFKFIEETLFIEDLGLTDEIQSKIEEILLTKTKTRLDRQKEIVKLFNTKHQKLDDKQKKLLEAIFKLCLGLKGNMVNIFGDKGEYGIDFTDVEDKKKKVEFSADYDNNINDYVDFFGEYFELLEITKKINDTVIFSEILVDGKGFSESKVISYEKHQQDLRKLKTLLKSLDKTLGYKYGEGLYQKILLDDVKSNYVNYSGNSQKLKKCTKDEFYGFIKSKLNSVTKKEKVSEAQQKEIAQILADMEFGDYLPLQRTTDNGVIPNQLHKKELIEIIEQQTKYHDFFNDVDENGLTIKDKIISLMTFRIPYYVGPLNDYHKVADGTGHAWIEKKKDGKIYPWNFDEMVDTEATAEKFIKNLTNKCTYLKGEDVLPKESKLYSEFMLLNELNNIKIDNQKLDPKLKMKMVSELFMKKNEKITKKKIVDYLRSIGQANGNEMVSGIDREIKSDLKTIHKIQHYYQDASLEMAENIIRWNTIFNDSTSDILKDKITKAYGDVLTPGQIKGLSNLACKDWGKLSEKFLTGIRCDVGEFKNISIIQAMRDTNNNLMELLSNKYEFMDKIQEYNKEYYGDFTFKAEPSIMDDLYVGPGPKRAIWQAVRIVEEIKRIMGHDPEKIFLETTRTNRAPKVKNTKRYDALEKKYESVKEHEYAEVKKEFEIEKNDSLNIKKLFLYFTQLGHCMYSDEKIPYNELFTNRYDIDHIYPRSKTRDNSMDNLVLVKAECNRDKKDNYPIKLKTNIQQKCQVRWAYLRDKKLITEEKYNRLVRKTPLTEDELSQFIARQLVFTSQSVKATAEVFKRLYEDSKICYVKAENVSDFRYGSTRKMSKDDQPQPFIKNRDVNDFHHAKDAYLNIVVGNVYDVKFTQNPTRFIKANKDYSLNYIFRYPVNKKGENVWDPEQSMKIVEKTLKSNDVRVTKLVKPITSPISNETLHKALKCKPGSYLPRKSSKGTPLADVTKYGGYEKIKNAYYSIYKYTYMKKKECMEEFLLVPIPIHLVNNDEELPKYINDKIAERAKKKKLETVECIVKELYQGTLVRINGYDYRIAGSSGKQFELHNGINLIVEPWVEKVLKETDKFVRKSNSKLDKKQQKENTTETLIEKQLNDVFEYLCRKLNQGIFKNNKHTLPAKLLGDSIQKRFEDASIEDEFEVIKELISAIAKNPQNFKTIQKVLDISGSSIPRFNLKLTKNNVDEFIIKNESVTGLFTHEKVIFRK

SEQ ID NO: 207 - protein, 1354 aa, Lactobacillus coryniformis subsp coryniformis KCTC 3167
MTLHYNVGLDIGTNSVGYTIVDDNGKILQVKGKNGYGVRVFKEGATAAERRIFRTTHRRLKRRKWRLRLLQDFFEPYILPQDDGFFIRRKESNLVLNDRDEDTASLFNDRSDRDFYQAYPTIYHLRQALMTEKRQFDVREIYLAMHHIIKYRGHFLLNGTVNNFTNNKIDLHSDFEELNALLLNVIPELKFQIDLDHSTMFQTTLLNTTISRSGRQRDLVKSFYNGSDDKQLAKQQKSVATELLKAILGLKAKFHKLFNLDLLETTEWEFSFDAEDIDDKLAKLEPLMTENQQQVMDILQRIFAAITLNGIVPEGKTLSASKVDSYQKHKQDLKLLKAIAQHSDKKTATVLQTAYNEYINGIASKPLKQEDFYKRLTNAVKKSSDPQVADMLALIDQEKFLPKQRTKENGAIPHQLHQLELERIIDNQKDYYPWLAELNPNQARQKVAKYKLSELVAFRVPYYVGPLIEPEVQQATSNAHFAWMARKEAGPITPWNFDQKVDRNVSAERFIKRMTTKDTYLLAEDVLPLHSLLYQRFIVLNELNNVRVNGQKLTKKQKQAVYQDLFKRQPHVTKKQFKSYLVQTGEFAESSKIEGLANETSFNSGLTTENELRKIFGAQLDEARYQVDFEQIIEWATLFEDAKILRTKLAEITWLTTEQIEKLAGIRYRGWGRFSRKLLAGLRDQNGQQIIDLLWDTPNNFMVIVSQAAFSEAITKENEKLIDRRGAQDVITDLYTSPQNKKALRQVLAIVADVQKAMGGVPPQRIFIEFAREDEKNPRRSVERSRQLEKLYQTISNEFLINSEVRQELKEAVDQKVNFKDRLFLYFLQGGVDLYSGKRINIDQLSHYDIDHILPQSFIKDDSLDNRVLVSQKLNRSKSDSVPLSEFANYKFGPAMQAKWLQLKEAGLLSKRKYDNLTLDPTKLSKFAPLGFVNRQLVETRQVIKLAANLLASEETKVVTIKANMTHQVRKELDFPKNRNVNNYHHAFDAYLTAFVGIFLSKRYPKLKPYFTYGDFQKGNKLPDLKNFNFLYELKNKDRSIDSNTGEIIWDKQRDLAYMNKIYNFKKVTVVHEVLTKSGALYNQTLYKASEDKASGRGTKQLIRKKDNMPTELYGGYTGSTSAFMSIVRLWKKDKPYYKVVGIPTRMAAKLANQAQLLDYLTKKFTTRKLVKKTGDYKTTVERFELVVPKVGFNQLVIDGGQPFMLGSATYQYNARELFISKEAVKALNKQLSTHVDLVQVFDEILVQVNRWFPLYDTNGFREKLSHGRDRFMKLNDSFEEKSDTQIDVLNRILIGFHANAARTNLKILGLGTDLGFMTQQAGIRLTEKAILVHQSPSGLFERKVALRDLKGLR

SEQ ID NO: 208 - protein, 1119 aa, Lacotbacillus coryniformis torquens
MGYRIGLDVGITSTGYAVLKTDKNGLPYKILTLDSVIYPRAENPQTGASLAEPRRIKRGLRRRTRRTKFRKQRTQQLFIHSGLLSKPEIEQILATPQAKYSVYELRVAGLDRRLTNSELFRVLYFFIGHRGFKSNRKAELNPENEADKKQMGQLLNSIEEIRKAIAEKGYRTVGELYLKDPKYNDHKRNKGYIDGYLSTPNRQMLVDEIKQILDKQRELGNEKLTDEFYATYLLGDENRAGIFQAQRDFDEGPGAGPYAGDQIKKMVGKDIFEPTEDRAAKATYTFQYFNLLQKMTSLNYQNTTGDTWHTLNGLDRQAIIDAVFAKAEKPTKTYKPTDFGELRKLLKLPDDARFNLVNYGSLQTQKEIETVEKKTRFVDFKAYHDLVKVLPEEMWQSRQLLDHIGTALTLYSSDKRRRRYFAEELNLPAELIEKLLPLNFSKFGHLSIKSMQNIIPYLEMGQVYSEATTNTGYDFRKKQISKDTIREEITNPVVRRAVTKTIKIVEQIIRRYGKPDGINIELARELGRNFKERGDIQKRQDKNRQTNDKIAAELTELGIPVNGQNIIRYKLHKEQNGVDPYTGDQIPFERAFSEGYEVDHIIPYSISWDDSYTNKVLTSAKCNREKGNRIPMVYLANNEQRLNALTNIADNIIRNSRKRQKLLKQKLSDEELKDWKQRNINDTRFITRVLYNYFRQAIEFNPELEKKQRVLPLNGEVTSKIRSRWGFLKVREDGDLHHAIDATVIAAITPKFIQQVTKYSQHQEVKNNQALWHDAEIKDAEYAAEAQRMDADLFNKIFNGFPLPWPEFLDELLARISDNPVEMMKSRSWNTYTPIEIAKLKPVFVVRLANHKISGPAHLDTIRSAKLFDEKGIVLSRVSITKLKINKKGQVATGDGIYDPENSNNGDKVVYSAIRQALEAHNGSGELAFPDGYLEYVDHGTKKLVRKVRVAKKVSLPVRLKNKAAADNGSMVRIDVFNTGKKFVFVPIYIKDTVEQVLPNKAIARGKSLWYQITESDQFCFSLYPGDMVHIESKTGIKPKYSNKENNTSVVPIKNFYGYFDGADIATASILVRAHDSSYTARSIGIAGLLKFEKYQVDYFGRYHKVHEKKRQLFVKRDE

SEQ ID NO: 209 - protein, 866 aa, Lactobacillus crispatus FB049-03
MGATQQINNIIIDIDVQGEKMGWRNVIITQHAKLTYSMNMLIVQTKDGINQIPIEDINLVLISTSQAVITSALISKLAKNQCKVIFVDDKYQPVTETVNYYPGARDIKKLKMQFEWNERRKENLWTKIVAAKLKNQISVLKNYRIDETEVEQELYKLEVNDLSNREAAAARKYFMKLFGKDFIRRNSGVINAALDYGYSILLSSFDREIAMNGYLTYLGIHHHSVENQFNLACDLMEPFRSIVDYWVKAHENITSFTPDIKYGLVELLSLQIKFNGRNTILTNAISVYVRSCLRYLSGETDDIRIEMSLCNEVPNDAINDNVKYYLYFMQLGRDAYTGKPINIDEVSQYYDIDHILPQSFIKDDSLNNRVLVAKPINNGKSDGVPLKLFGDNLATGLGITVKQMWNNWADKGLINKAKQNNLFLDPENINKHQASGFIRKQLVETSQIIKLATTILQAEYPKTKIIVVKASSNHYLRNEFDLYKSREVNDYHHAIDAYLTTICGNLLYQAYPKLRPFFVYGQFKKFSSDPKKENEILKKTKNFDFVAKLLGSKAPNEIRSQQGKVLFEKNKIRLQLNKAYNYKYMLVSRDTTTKNQEMFGMTIYPRAERDIAKSRKLIEKRKGFSTDIYGGYTGTAAAYMAIVRINKTKSSQYKVIAVPMTKRAILNKAEKEGNYEKILKQILSPSILYNDKGKRKAGVISFDIIKGKVPYNQVVQDGNKKFLLKSAIYLCNAKQLVLSEEAMRVITGHWLDSDKQDQELLDVYDEILEKIDRYLPLFDIRDFRNKLHKGREKFLKLNAEDKFKAIIQILKGLHDNSDTGELKDIGITVPFGQLQNNSGITLSSDTILVYQSPTGLFEKRVKISSL

SEQ ID NO: 210 - protein, 1368 aa, Lactobacillus curvatus CRL 705
MSRPYNIGLDIGTSSIGWSVVDDQSKLVSVRGKYGYGVRLYDEGQTAAERRSFRTTRRRLKRRKWRLGLLREIFEPYITPIDDTFFLRQKQSNLSPKDQRKLYTQTSLFNDRTDRAFYDDYPTIYHLRYRLMTEKRQFDIREIYLAMHHIVKYRGHFLNEAPVSSFKSSEINLVAHFDRLNTIFADLFSESGFQLETDKLAEVKALLLDNQQSASNRQRQALSLIYTPSTNKAVEKQNKAIATELLKAILGLKAKFNVLTGIEAEDVKAWTLTFNAENFDEEMVKLESSLDDNAHQIIESLQELYSGVLLAGIVPENQSLSQAMITKYDDHQKHLKMLKAVREALAPGDRQRLKQAYDQYVDGQENTKAYSKEDFYGDITKALKNNPDHPIVSEIKKLIELDQFMPKQRTKDNGAIPHQLHQQELDRIIENQQQYYPWLAELNPNSKRQTVAKYKLDELVAFRVPYYVGPLITAEQQRQSSDAKFAWLIRKAEGRITPWNFDDKVDRQASANEFIKRMTTTDTYLLAEDVLPKQSLIYQRFEVLNELNGLKIDDQPITTELKQAIFTDLFMQKISVTVKNIQDYLVSEKRYASRPAITGLSDENKFNSRLSTYHDLKMIVGDAVDDVDKQADLEKCIEWSTIFEDGKIYSAKLNEIDWLTDQQRVQLAAKRYRGWGRLSAKLLTQIVNANGQRIMDLLWDTTDNFMRIVHSEDFDKLITEANQMMLAENDVQDVINDLYTSPQNKKALRQILLVVNDIQKAMKGQAPERILIEFAREDEVNSRLSVQRKRQVEQVYQNISNELLNNTEIRNELKDLSNSALSNTRLFLYFMQGGRDMYTGDSLNIDRLSTYDIDHILPQSFIKDNSLDNRVLVSQKMNRSKADQVPTDFTSVELGQKMQIQWEQMLRAGLITKKKYDNLTLNPDHISKYAMKGFINRQLVETRQVIKLATNLLMEQYGEDNIELITVKSGLTHQMRTEFDFPKNRNLNNHHHAFDAYLTAFVGLYLLKRYPKLKPYFVYGEYQKASQQDKWRNFNFLNGLKKDELVDENTEAVIWDKESGLAYLNKIYQFKKILVTRGVHENSGALFNQTLYAAKDDKASGQGGKQLIPAKQDRSTALYGGYSGKTVAYMCIVRIKNKKGDLYKVCGVETSWLAQLKQLTDEDSQKAFLEQKISPQFTKVKKQKGNIIEAVEEFEVIAPHILINQRFFDNGQELTLGSATYKHNEQELILDKTAVKLLNGALPLTQSEELAEQVYDEILDQVMHYFPLYDTNQFRAKLSTGKAAFMKLPWKSQWDGNKMVQVGQQVILDRILIGLHANAAMSDLKVLKMTTPFGMIQQSTGITLSADTQIIYQSPTGLFERRVALRDL

SEQ ID NO: 211 - protein, 1427 aa, Lactobacillus delbrueckii subsp lactis CRL 581
MAKPKDYTIGLDIGTNSVGWVVTDDQNNILRIKGKKAIGARLFAEGKVAAERRSFRTTRRRLSRRRWRIKLLEELFDKEIAKVDPSFFARLHESWISPKDKRKRYSAIVFPSPEEDKKFHESYPTIYHLRDKLMKDDQKHDIREIYIAVHQMIKARGNFLHDESVETYRSGMSSLGGRSERTILSVQTLEELNDLFAENEGTEEAKLNVASAEQINDILTGGHLNADSQKEIGNLLLPSSFPSFDDKAKEKQVKKLIKNVATNISKAWLGYKADFSTILNLANVDKDQKKIFAFALQGGDEEDKVQELESLLEQSQTDIVDRLIEIRHAIVLSEIVPVGMTLSEAMIDKYDQHKEDLITLKAVIRNTKDKKKAAKLQAIYDLYVNNRHADLAKAMKLTGIKKRSELLDPEELKKAISSLLDDSPEAVEIKQMLEEKTFLPLQRSNNNGVIPNQLHQVELDEIIKKQSKYYPFLAEKNPDESEEAQKKAPTKLDALLTFRVPYYVGPMITKEEQEAQDGHSFAWMVRRDPQDHEAITPWNFEKKVDKMASATQFIKRMTTKDTYLLGEDVLPASSLKYQLFTVLNELNNLRVNGKKLTSDEKEQVIEGLFKKQKTVKADKFVKYWQAKHIGADIKVKGLSDPSKFNSTMSTYIDFKKIFGDQLNDVNRQNDFEKIIEYSTIFEDRKILEDKLRADFAWLSEEQIKQLCRLRLQGWGRLSDKLLTRLTDADGQNVLERLWNSNDNFVQIVSDPNIKAKIEQENQKLLRDGQSDDAVESILDDAYTSPQNKKAIRQVMRVVHDIVKACDGNVPAKFAIEFARSQEDDPKRTTARVNQMQKIYDQISDEVVSQGVKEQLSGMKSLKDRYYLYFMQGGRDAYTGAKLNIDRLSDYDIDHIMPQSFVKDDSLDNRVLVARAVNNQKSDKVPALLFGNKVVADLGITVREMWDKWQKLGMISKRKLSNLLTDPDALTEYRAQGFIRRQLVETSQVIKLTATILQSEFPDSKIIEVPAKYNSIVRKQFDLYKSREVNDYHHAIDAYLSTIVGNYLYQVYPNLRRMFVYGEFKKFSSNAEESAYDVVRRVKSMNFLDDLLRGTHGDNIYCRSTGEIVFNRNDIISKLKQAYSFKQMLVTQEVFTKKSALFDQTVYPSPERDSKKRSGLIPRKKGMDTEIYGGYSGNKDAYFVLAEAVKEKGHTLQIVGVPIRALNTLKNSANYSEKLLEIIKPQVMFNKDTGKPIKGIKDVKILMDKIPCRQPVLEGESYYMLASSKYRYSLKQISLSQMSMKYILDYIDDPNFNKHEMINIDQQDEKECLLSVYDEILEKMDKYLPLFDIRSFRKKLHDGRDAFIALPVASEEKKPGKVDVIRKVLKGLHANADITNLAELGFGTAALGALVSTGGIKISDDAVFIYQSPTGLFERRVKVSDLLK

SEQ ID NO: 212 - protein, 1430 aa, Lactobacillus delbrueckii jakobsenii DSM 26046
MRNKEKKKGKRKMAKPKDYTIGLDIGTNSVGWVVTDDQNNILRIKGKKAIGARLFAEGKVAAERRSFRTTRRRLSRRRWRIKLLEELFDEEIAKVDPSFFARLHESWISPKDKRKRYSAIVFPSPEEDKKFHESYPTIYHLRDKLMKDDQKHDIREIYIAVHQMIKARGNFLHDESVETYRSGMSSLGGRSERTILSVQILEELNDLFAENEGTEEVELNVASAEQINDILTGDHLNADSQKEISNLLLPSSFPSFDDKAKEKQVKKLINNVATNISKAWLGYKADFSTILNLAKVDKDQKKIFAFALQGGDEEDKVQELESLLEQSQTDIVDRLIEIRHAIVLSEIVPVGMTLSEAMIDKYDHKEDLITLKSVIRNTKDKKKAAKLQAIYDLYVNNRHADLAKAMKLTGIKKRSKLLDPEELKKAISSLLDDSPEAVEIKQRLEEKTFLPLQRSNNNGVIPNQLHQVELDEIIKKQSKYYPFLAEKNPDESEEAQKKAPTKLDALLTFRVPYYVGPMITKEEQEAQDGHSFAWMVRRDPQDHEAITPWNFEKKVDKMASATQFIKRMTTKDTYLLGEDVLPASSLKYQLFTVLNELNNLRVNGKKLTSDEKEQVIEGLFKKQKTVKADKFVKYWQAKHIGADIKVKGLSDPSKFNSTMSTYIDFKKIFGDQLNDANRQNDFEKIIEYSTIFEDRKILEDKLRADFAWLSEEQIKQLCRLRLQGWGRLSDKLLTRLTDADGQNVLERLWNSNDNFAQIVSDPNIKAKIEQENQKLLRDGQSDDAVESILDDAYTSPQNKKAIRQVMRVVHDIVKACDGNVPAKFAIEFARSQEDDPKRTTARVNQMQKIYDQISDEVVSQGVKEQLSGMKSLKDRYYLYFMQGGRDAYTGAKLNIDRLSDYDIDHIMPQSFVKDDSLDNRVLVARAVNDQKSDKVPALLFGNKVVADLGITVREMWDKWQKLGMISKRKLSNLLTDPDALTEYRAQGFIRRQLVETSQVIKLTATILQSEFPDSKIIEVPAKYNSIVRKQFDLYKSREVNDFHHAIDAYLSTIVGNYLYQVYPNLRRMFVYGEFKKFSNAEESAHDVARRVKSMNFLDDLLRGTHGDNIYCRSTGEIVFNRNDIISKLKQAYSFKQMLVTQEVFTKKSALFNQTVYPSPKRDGSKRSGLIPRKRGMDPEIYGGYAHNQDSYFVLAKIEKVKGYTLQIVGVPIRSLEIINKAEDFSTALLDIIKSKVMYNEKTGQPKRGIKNVEILVNKLPYRQPILEKDVSYMLGSSAYKYNVKQITLSRQSMKYILDYIDDPNFTKHEMTMIDEQNERECLLSVYDEILEKVDKYLPLFDGNKFREKLHSARKEFVSLSVDDEASAIEKILRGLHANSEMPSLENLKIKPALGFFQMKNGITLSNDAVLLYQSPTGLFERRVKVSDLLK

SEQ ID NO: 213 - protein, 1363 aa, Lactobacillus diolivorans DSM 14421
MRGNYHIGLDIGTSSIGWAVIDDNAKVMRAKGKTAIGARLYNEGQTAADRRLFRTTRRRLNRRKWRLKLLDEIFDPYITPVDAAFFARLKQSNLSPKDQNRDWTGSMLFPDRTDRKFHKDYPTIYHLRHKLMTEDHQFDIREIYLAIHHIVKYRGNFLNTTPVSSFSVSDVKFDEQFDRLNELYAAVSPDEPFAINGDNSKAIETLLLSDETKKFDKQKQSAKLILSETGDKALDKENTKVATQISKAILGYKTQLDVLLKYDAINSSAWKIELDDENIDDTLPGLLSQLDENRQEMVSIIQNLYAQVTLNQIVPNGMSLSESMIEKYNAHRDHLKLLKQLEDKIDDPKKKKGLEAAYDAYVGKNMKVANQDVFYASVKKNLDDSDLAKQIADLIEAQKFMPKQRTSQNGVIPHQLHQLELDQIIENQSKYYPWLTAANPNPKRIHQAKYKLDELVAFRIPYYVGPLVTPEEQEKSANQVFAWMKRKQPGTITPWNFDQKVDRMASANRFIRRMTTKDTYLIGEDVLPDASLIYERFKVLNELNLVKANYHRLAPAQKQAAYRDLFENQKSISTKKLQNYLVDQGYFTAKPKITGLSDPERFNSSLGTYIDFKEIFGDQVDNPDRQDDYEKIIEWSTVFEDRQIYEAKLRTLDWLTEDQIQALKTKRYNGWGRLSKKLLTGIVDENGERIIDVLWNTNQNFMQVQSQESFAKRIHEANAKQMKVTGVEDILADAYTSPQNKKAIRQVIRVVDDIQKAMGGVAPTSVSIEFTRSEDQNPRRTQSRESQLQNTFKVDAKEIVDSDLVTELETVSKSKKGLTDRLYLYFTQLGKDMYTGDPLNIDELSTYDIDHILPQAFIKDDSLDNRVLVSKAVNNGKSNNVPVKLFGGKMGGFWKELADHRLISKRKLKHLLTDPDTIDKYTMRGFIRRQLVETSQVIKLVAQILGDKYQNDDTKIIEVTAKMNHQMRENFKLIKNREVNDYHHAVDAYLTAFVGQYLYKRYPKLRPYFVYGNFKKFNEDHVSFRYFNFLHELMDENNKRIVEPETGEVVLEREPAIAYMKRVYHFKFMLISQEVYTRRDAMFNQTIYPAKEANRRKLIAIKHGKPVDVYGGYSGSVDAYMAIVRIHDKKGDKYKVVGVPMRALEILNATHDKKDYDAKLKQILVPKFTKVKKSRKTGEITKKVEDFEIVLGKVMYRQLVIDGDKKFMVGSSTYLYNARQLVLSDSSLDTLASKGTLDSDADSKRLVAVYDEIVEKVDKYFPLYDKNAFRSGLHKGRDKYLLLPNRSTFNGAKKVHSGKREILNEILNGLHANATLGGLKDLKISTPFGKMQGQSGIPLSSNTIICYQSPTGLFEHRVSLKDL

SEQ ID NO: 214 - protein, 1356 aa, Lactobacillus farciminis DSM 20184
MTKKEQPYNIGLDIGTSSVGWAVTNDNYDLLNIKKKNLWGVRLFEEAQTAKETRLNRSTRRRYRRRKNRINWLNEIFSEELAKTDPSFLIRLQNSWVSKKDPDRKRDKYNLFIDGPYTDKEYYREFPTIFHLRKELILNKDKADIRLIYLALHNILKYRGNFTYEHQKFNISNLNNNLSKELIELNQQLIKYDISFPDDCDWNHISDILIGRGNATQKSSNILKDFTLDKETKKLLKEVINLILGNVAHLNTIFKTSLTKDEEKLNFSGKDIESKLDDLDSILDDDQFTVLDAANRIYSTITLNEILNGESYFSMAKVNQYENHAIDLCKLRDMWHTTKNEEAVEQSRQAYDDYINKPKYGTKELYTSLKKFLKVALPTNLAKEAEEKISKGTYLVKPRNSENGVVPYQLNKIEMEKIIDNQSQYYPFLKENKEKLLSILSFRIPYYVGPLQSAEKNPFAWMERKSNGHARPWNFDEIVDREKSSNKFIRRMTVTDSYLVGEPVLPKNSLIYQRYEVLNELNNIRITENLKTNPIGSRLTVETKQRIYNELFKKYKKVTVKKLTKWLIAQGYYKNPILIGLSQKDEFNSTLTTYLDMKKIFGSSFMEDNKNYDQIEELIEWLTIFEDKQILNEKLHSSKYSYTPDQIKKISNMRYKGWGRLSKKILMDITTETNTPQLLQLSNYSILDLMWATNNNFISIMSNDKYDFKNYIENHNLNKNEDQNISDLVNDIHVSPALKRGITQSIKIVQEIVKFMGHAPKHIFIEVTRETKKSEITTSREKRIKRLQSKLLNKANDFKPQLREYLVPNKKIQEELKKHKNDLSSERIMLYFLQNGKSLYSEESLNINKLSDYQVDHILPRTYIPDDSLENKALVLAKENQRKADDLLLNSNVIDRNLERWTYMLNNNMIGLKKFKNLTRRVITDKDKLGFIHRQLVQTSQMVKGVANILDNMYKNQGTTCIQARANLSTAFRKALSGQDDTYHFKHPELVKNRNVNDFHHAQDAYLASFLGTYRLRRFPTNEMLLMNGEYNKFYGQVKELYSKKKKLPDSRKNGFIISPLVNGTTQYDRNTGEIIWNVGFRDKILKIFNYHQCNVTRKTEIKTGQFYDQTIYSPKNPKYKKLIAQKKDMDPNIYGGFSGDNKSSITIVKIDNNKIKPVAIPIRLINDLKDKKTLQNWLEENVKHKKSIQIIKNNVPIGQIIYSKKVGLLSLNSDREVANRQQLILPPEHSALLRLLQIPDEDLDQILAFYDKNILVEILQELITKMKKFYPFYKGEREFLIANIENFNQATTSEKVNSLEELITLLHANSTSAHLIFNNIEKKAFGRKTHGLTLNNTDFIYQSVTGLYETRIHIE

SEQ ID NO: 215 - protein, 1353 aa, Lactobacillus fermentum DSM 20055
MMRIKGKTAIGVRLFEEGKTAAERRTFRTTRRRLKRRKWRLHYLDEIFAPHLQEVDENFLRRLKQSNIHPEDPAKNQAFIGKLLFPDLLKKNERGYPTLIKMRDELPVEQRAHYPVTNIYKLREAMINEDRQFDLREVYLAVHHIVKYRGHFLNNASVDKFKVGRIDFDKSFNVLNEAYEELQNGEGSFTIEPSKVEKIGQLLLDTKMRKLDRQKAVAKFLEVKVADKEETKRNKQIATAISKLVLGYKADFATVAMANGNEWKIDLSSETSEDEIEKFREELSDAQNDILTEITSLFSQIMLNEIVPNGMSISESMMDRYWTHERQLAEVKEYLATQPASARKEFDQVYNKYIGQAPKEKGFDLEKGLKKILSKKENWKEIDELLKAGDFLPKQRTSANVVIPHQMHQQELDRIIEKQAKYYPWLATENPATGERDRHQAKYELDQLVSFRIPYYVGPLVTPEVQKATSGAKFAWAKRKEDGEITPWNLWDKIDRAESAEAFIKRMTVKDTYLLNEDVLPANSLLYQKYNVLNELNNVRVNGRRLSVGIKQDIYSELFKKKKTVKASDVASLVMAKTRGVNKPSVEGLSDPKKFNSNLATYLDLKSIVGDKVDDNCYQTDLENIIEWRSVFEDGEIFADKLTEVEWLTDEQRSALVKKRYKGWGRLSKKLLTGIVDENGQRIIDLMWNTDQNFMQIVNQPVFKEQIDQLNQNAITNDGMTLRERVESVLDDAYTSPQNKKAIWQVVRVVEDIVKAVGNAPKSISIEFARNEGNKGEITRSRRTQLQKLFEDQAHELVKDTSLTEELEKALDLSDRYYLYFTQGGKDMYTGDPINFDEISTKYDIDHILPQSFVKDDSLDNRVLVSRAENNKKSDRVPAKLYAAKMKPYWNQLLKQGLITQRKFENLTMDVDQNIKYRSLGFVKRQLVETRQVIKLTANILGSMYQEAGTDIIETRAGLTKQLREEFDLPKVREVNDYHHAVDAYLTTFAGQYLNRRYPKLRSFFVYGEYMKFKRGSDLKLRNFNFFHELMEGDKSQGKVVDQQTGELITTRDEVAKSFDRLLNMKYMLVSKEVHDRSDQLYGATIVTAKESGKLTSPIEIKKNRPVDLYGAYTNGTSAFMTIIKFTGNKPKYKVIGVPTTSAVGLKRVGKPGSESYNQELHRIIKSNPKVKKDFEIVVPHVSYSQLIVDGDCKFTLASDTYQHPATQLVLSKESMEIIADDFKFVKENPATADEQLVRVFDEIVNQMNHYFTIFDQRSNRQKVTKARDKFVSLPTESEYEGAKKTQVGKTEVITNLLMGLHANAAQGDLKVLGLSTFGFFQSSGGLNLSEDAMIVYQSPTGLFERRICLKDI

SEQ ID NO: 216 - protein, 1346 aa, Lactobacillus floricola DSM 23037 A
MNQTKNYDIGLDIGVGSVGWTITDSQSQKVLKVKGKQGIGVHLFNEGQTAEERRQFRTNRRRLKRRKWRLRLLRELFDEPISSIDPEFFARLKYFNESSKDPKNKGYQPQLHDDLKDVDFYRQYPTIYHLRHALMTQKEKFDIRDIYLAIHHIVKYRGHFLMNGHSSSFSVAQTDWKADLTKLFELIQETRTNLDFSFDLTEIDTIKSLLFDKNLSRNDRQKEIVGLINNNSQLDKKDKALTKQLVESVVKGIVGMKTRTDILLGYEVDNKEQSKAWNFSIDELDDQMATIDPALSQNSQAHDIITLIQKLYMTVQLAQIVPEGQSVSEMMINRYNLYAEQLQQLKDYKKINLETGLLLREAYDELMTKALTAAPGKTIHDTFYNKVKKILKDQDNKQALSIKQAIEDSNYLIPLRIKSNGVIPYQLHQRELDAIIENQKEFYPFLATPNPVDGHQEALPYKLDELIGFKVPYYVGPMVDPEVDSDQNFAWMVRKEKGEITPWNFHNKVDITQSADNFIKRMKTTDTYLIGKDVLPQNSLLYQRYTVLNELNGIKVANKKLTIEQKQRLYDQLFKKKKTVKKQDILNNLVAAGEIHEDDNLTGLSNGTTFNNNLGSYIDYCKIIGQDKLEDASKQADIERIIEWSTTFEDANIFLTKLAEINWLTEDQRQKLSQIRYRGWGQFSKTLLTDIKDNKDNSIIDNLMSTKKVFMQIINDTTIKQKIDDYNQYHLNHADLKDTIANLFTSPQNKRAINQTLLVIEDIINAVGHKPNRIFIESAKDNRNAKNQLTQSRLKRIVKQFEDNKQHVDQSVYEELKQLDDGSHASIDDRLLLYFLQNGKDMYTGQPIDISQLSTSQYHIDHILPQAKVMDNALDNRVLVSSKANTEKSDRFLSEIPQFQQRSLWAELERMGFLTKAKKERLLMTSDEFKQNSVRFIARQLVETRQIIKLVNQLIIQEHPEVKLVNIKADLTNAFRKKFNFVKNRNANDYHHAFDAYLTSLIGSHLLKSHPKWEPLFVYSDYDKIKFDNAPQGVNIMKEFEQSKLADENGEIIWNKDEMMAYLERLYNSRQILITKKVYARHGNLFKQTIFKAGESDNLIPVKNNRSDIAIYGGYKSKQVSYYALISLHNKKRQKRLVAVYLIDIQKLQNLNESDYFKTLHTIIKERHNIKPEFDILADKIYQNQLIIDNKNGSNRPFRIEGDFKNDRQLYLPLQYQRWLASKEPTDEKLNRIFDHICEQLADYFPLFAGNACDKLLDNRDKFYQLSIKSEFNDKGKLIAEGKLSVIDKLLVAMHADSRNSNLAVIGLSSSWGRFKLHGGNEAIGTSVQLIHQSPTGLFKRIQRFN

SEQ ID NO: 217 - protein, 1402 aa, Lactobacillus floricola DSM 23037 B
MTYRNYHIGLDIGTSSVGFAVRYDNGELVHKKGSNLVGARLFKEGETAEERRLNRGARRRYNRRKWRLNLLNQIFKPLIEVNDPTFFKRLEQSNLVNYDKSESFSLLNNQSDDKLHQQFPTIYHLRDYLMKSTEKADIRLIYLAVHHIVKYRGNFLDASPVDSFEASNLKVDEILTQINLLLDNLTDDLRLNTQYVTDIEQTLLSNTESNKDKEKVIQKLLLHKEAIKIDKDRTAQIAKLVLGYKADIAKLFGITEKLQTPKLELSAANSDDALMELSAELNEDQIGILLQLKTLYSRVRLNQIIPSGTSLSKSMIEKYELHHTQLKSFKENILLKLRRNTAVRRNLELAYALYVGNAQTKQEVFEPKKARFTSDDFASLKANAKSASSVKEAPKNTKTKLTTDDFYNILTELFATFESELSADEDMIKEVEQIKKAITGDNYLPKQRTDQNGNIPHQLHQIELRQILQNQLPHYPEMDKINEQKPIEKLVTFRVPYYIGPLITPEDQQKSSAANFAWMKRKEQGAITPWNFDDKVDRMQSATNFIKRMTVKDTYLINEDVLPDRSLLYQRFKVLNELNLVKVNNQLLSIGEKQAIYHDLFEKQKTVSTKKLQSYLQSEQGYGDNIEISGLSNPDKFNNGLTTYIDFKNIFGDLVEDTTKQKEFEQIIEWSTVFEDRAIFKAKLQEVNWLTEEQIKALVAKRYSGWGRLSYRLLAELVNDNGERIIDILWNNKGSNLMSIVSQDEFQQQIARINSHEVQELGMESVLANAYTSPQNKKAIRQVMKVVDDIQLAMNGQAPTSISIEFTRKPEENSEISKSRYETITSIYQSLSKDIEKEVKDNLNKNKSSLKKNLSDKYYLYFTQLGRDIYTNQPIPFNEIPYYDIDHIVPRSVEMNDSLNNRVLVAKSINQIKKNNAPIDSSLKITSETRQLWKKLLDSGLITKQKYYKLSSSIKNTVSPYVKQGFINRQLVETSQVIKLVANILGTKYQNDDTEIIEVKAHLNSEIRKTFEFYKLRELNDYHHGFDAYLTTLVGGYLYNRYPKLRSYFVYGDHKRLDKAQLSELKNFNFLHGLTNPKSGSDGLITASGSQQVVLDRNETIKRLNKIYRYKYMLISREVFTKQGQFYNETIYPAKPNTAKMIPLKDNKPSEVYGGYSSSNVSKIALIKEKNTDNYQFIGIPIRSIAKLKQAKANSKTVYQTELNRVIKSVLASQKTKKQKEFEVILDNVKYNQVVVDQGEKYYLGSPYYKKNAKQLVISPESVKILADKATADLPEQEAHNKLMTVYQEIVDVLNKHFALYDINNVRKKLNDGLIKFSQLPNYDETSKNRFDISKSIKTKYAVIMRILSGIKNQTSEVPELGLKSPLNKMQTKGGIKISPEAKIYYSSPTGIFSHFKQVKNL

SEQ ID NO: 218 - protein, 1364 aa, Lactobacillus fuchuensis DSM 14340
MNKRYNIGLDIGTNSIGWSVVNDQSQLVRIKGKLGYGVRLYDEGQTAEDRRLFRTTRRRLKRRKWRLGLLREIFEPYITPQDATFFLRQKQSNLSPKDLQKQQPQIGLFNDRLDSDFHYQYPTIYHLRYALMTEKRQFDLREIYLAMHHIVKYRGHFLNAAAASSFKSGEIDLAKDFAALNQIFGTIFSEVGFSLSESNLDEIKSILLDNNLSASVRQRKALPLIYQTAASKDSEKQYKAIATELLKAILGLKAKFNLITGIEVEDVKAWTLSFNAEDFDAKLSDLNIADNDDAVQIIEILRALYSGVLLTGIVPEGQSISQAMIDKYEAHKAHLIMLRSIREQLSDKENKALEKAYDDYIDHPEDKQHGSREDFYAAITKVLKKDSEDTNIIEILKLIELDQFMPKQRTKDNGAIPHQLHQQELDQIIENQKQYYPWLADINPNEQRQKMAPYKLDELVTFRVPYYVGPMITAEEQFQTSNKKFAWMIRKEPGAITPWNFDQKVDRQASANEFIKRMTTTDTYLLAEDVLPKQSLLYQRFEVLNELNGIKIDDQPITVEQKQAIFNDKFMQQAHVTVKNIQAYLVSEGQYASRPNITGLSDGEKFNSSLSTYHDLKKIFGDMIDDPNKQTDFEKMIEWSTIFEDGKIFADKLREINWLTDEQRQRLSNKRYRGWGQLSTKLLTKIVDQNGQRIIDILWNTNDNFMRIIHSDDFDQAVTQANQMLLADNDTQDVINELYTSPSNKKALRQILLVVADIQKAMKGQAPARILIEFAREKQANPRLSTQRRRQVEQVYQELNNDQLNKELADPQYANLSKDRLFLYFMQGGRDMYTGESLNIDRLSEYDIDHILPQAFIKDNSLDNRVLVSAKMNRSKSDHVPLDFTEERFGQKMRSQWEQMLRAGLLTRRKYNNLTLNPDSLNKYTMSGFINRQLVETRQVIKLATNLLVDQYADEDVQLVTVKSGLTHQMREDFDFPKNRNLNNYHHAFDAYLTAFVGLYLLKKYPKLAHYFVYGQYQQGFKANDQWRNFNFLNGLRQEQQVDAETGELIWQKDHDLAYMNKIYDFKKILVTREVHTNHGALYNQTLYKAKDDKASGQGGRQLIAAKENRPTAIYGGYSGKTVAYMCLVRITEKKGDFYRICGVQTAWVDELEHIEDATIKLQRLTALLTPQFSATKKQKDEVVTVVKPFEVLLPKILINQRFYDGGQELTLASATYKNNAQELVLDKKAVQVLNGQLPKAELEAQATVVYDQILERVQKYFPLYDMNSFREKLFVGRDKFNELPWQDQWENHKLIQVGQKTILDRILIGLHANAAMGDLKALNMSTPFGKLQKSNGISLSPETQIIYQSPTGLFERRVALKDL

SEQ ID NO: 219 - protein, 1129 aa, Lactobacillus futsaii JCM 17355
MADRISLGLDIGVASVGFSVLDIDKGKVIELGSRLFNATVAEGNQDRRSMRGARRLLNRNKQRRQDTGKLFQKFGLLDNFNKDNFYDTFNQNWNPYELRVKGLTEHLTKKELAESLYQIVKHRGISYALKDADADEGGTDYSASLKINSQELAEKTPAQIQLQRLNDYGKVRGQVVIGDDPDNQKVLLNVFPTSAYEKEAKQIIATQKQFYPEILTDEFTKEYCKILTRKRDYFVGPGNEKSRTDYGIYKTDGRTLDNLFEELIGHDKIYPDELRASAASYTAQLFNVLNDLNNLRILSYEDGKLTKEDKEKIIAEIKSNTTTINMLNVIKKVAGCSKEDIKGFRVNEKDKPEISSMAVYRKVHKDLLKVGVDISDWPVEFIDKLSFILTLNTENGEIRKQLNNRLVPEFDFLNDDLIQLIIDNKDSFEIKTNNKWHRFSLKTMNKLMPEMLERPVEQMTLLNEMGLVKKDKKRFENNKYLPYKEIAKDIFNPVASKSVREALKIVNAVLKKYGHIDYLVIEMPRDKNLKEEQDNIKEFQNKNKKAKDAAFEAFVKSVGSEQRVKEALSKNRKLQMKMRLWYQQQEIDPYNGETIDATDLINNPDKFEIDHIIPQSISFDDSINNKTLCFASMNQVKGQKTPYEFMLEGHGQGYDKFKATVLDNKNFDRNKRKNYLFEENVSDIETRKRFLSRNLVDTRYSSRVVLNSLQDFFHEKSADTKVTVIRGKFTSNMRKHWHIDKTRETFHHHAIDASIIAATPFLRMWKKGGTIFPVKVGEESIDIETGEILDDKKFDKVMYEEPYNGFVSEIMNADDRIKFSHQVDKKMNRKVSDATIYSTRTGKLAKDKKDAEYIVAKVKDIYSVDGFKKFKKVYDKDKSKFLLYKYDPRTFSELERIISDCPDKVEKVQTNGKVKAVDVSPFEMYRRYHGMIKKYSKKGNGPAIKQLKYLDKKLGSHIDITPANANGKHVILQSLKPWRTDVYLNHETGEYEIMGIKYSDLKFNKNVGYGIKKDKYLEIKKNEEVSEKSEFMFSLYRKDRVRIQNMKTGESVELLFWSRNFSNKKYAELKPIFKFVTEDDDWPVYGHAKTQILKRLVPKDCKIWKVNTTILGDPYYLEKESDNPKDILD

SEQ ID NO: 220 - protein, 1386 aa, Lactobacillus gasseri K7
MTKIKNEYIVGLDIGTNSCGWVAMDFQNTILRMHGKTAIGSHLFDAGNSAADRRAFRTTRRRIKRRKWRLKLLEEIFDPYMTEVDPYFFARLKESGLSPLDKRKNASSIVFPTALEDKKFYCNYPTIYHLRYDLMSEDKKFDLREIYLAIHHIVKYRGNFLYNTPVKDFEASKIDVKDSLEKLNELYERLDSEFTVELDSSNALEIEKIIRDKNVFKINKVKSIHQLLSLKTENKERTKLIKDVSKQIINAILGYKTKFETILLKNISKDEADDWEFKLTDVDADNKFENLIGDLNENEQEILLVIRNLANAITLSNIVEEGKTLSESMIDKYNKHSDDLKLLKQVISDHPDRDKAKKLALAYDLYVNNRHGKLLQAKDVLGSKKTLSKEDFYKEVKKNLDDSKASQEILDAIALDSFMPKQRTNENGVIPYQLHQLELDRIIKNQGKYYPFLKEANPVSSHLKQAPYKLDELIRFRVPYYVGPLISPNESTKNKQTKKNQNFAWMIRKEQGQITPWNFDQKVDRMASANKFIKRMTTKDTYLLGEDVLPANSLLYQKFTVLNELNNIKINGKRISVPLKQELYNNLFKKNSTVTTNKLKSYLKENYNLINVEIKGLADEKKFNSGLTTYNKLRNLKIFDQQIDDLNYDKDFERIIEWSTIFEDKAIYKDKLKTIKWLSDRQIDKLSKIRMQGWGQLSKKLLSQLTDNNGQTIIEQLWDSQNNFMQIVNQADFKDAIAVANQNLLVNTSVEDILNEAYTSPANKKAIRQVVKVVDDIVKAASGKVPKQIAIEFTRDADDKAKISQTRANKLRKVYKELSNELASEAIRNELERVAKDQKLLKDKYYLYFMQLGRDAYTGEPIDIDELEQYDIDHILPQSFIKDDSLENRVLVKKAVNNGKSDNVPVKLYGNHMAADLGITIRHMWEKWKDQGLITKTKYNNLIIDPDKINKYESSGFIHRQLVETSQIIKLASTILQSKYPDTEIIVVKARYNHYLRKHLNLYKSREVNDYHHAIDAYLSAICGNLLYQVYPYLRPFFVYGQYKKFSSDPKKEKIIYDKTRKYNFISQIFENKGNDIISLETKKKVFDKKDIIEKLKHAYDYKYMLVSRETETRDQEMFKMTVYPRLSRDTKKSRNLIPKKKDMPTEIYGGYTNNSDAYMVIARINKKKETEYRVFGVPMRELVNLRKAEKKGHYNAYLKQVLEPEIMYNKNGKKNKTISSFEIVKSKVPYKQVILDGDKKFMLGSSTYVYNAKQLTLSQDAMQAITDNCENDTDEEKALIEAYDEILTNIDKYLPLFDINKFRDKLHAGREKFINLSLDVKKDTILQVLNGLHDNAVMPKIKSLGLSTELGKLQIPTGVKLSENAKLIYQSPTGLFEKRVKISDL

SEQ ID NO: 221 - protein, 1368 aa, Lactobacillus graminis DSM 20719
MKRSYNIGLDIGTNSIGWAIVDDQSKLISVKGKYGYGVRLYDEGQTAAERRSFRTTRRRLKRRKWRLGLLREIFEPYITPIDSTFFLRQKQSNLSPKDQRKLYPQTSLFNDRPDADFYQQYPTIYHLRYQLMTEKRQFDIREIYLAMHHIVKYRGHFLNEAPVASFKSSEINLAEHFDQLNTIFADLFRESGFQLETDELVAVKALLMDNQQSASNRQRKALPKLYTPSADKSIEKQRKAIATEILKAILGLKAKFNVVTGIEAEDVKAWALTFNAENFDEELAKLESSLDDNGHEVIGILQELYSGILLAGIVPENQSLSQAMITKYEEHQAHLKMLKAVRDDLATADQQKLKKAYDQYIDGQENTKAYSKEAFYDDVTKALKDYSEQPLVSEIQKLIELDQFMPKQRTKDNGAIPHQLHQQELDRIIENQQQYYPWLAELNPNPKRQTVAKYKLDELVAFRVPYYVGPLITAEQQQQSSNAKFAWMIRKTEGRITPWNFDDKVDRQASANEFIKRMTTTDTYLLAEDVLPKQSLIYQRFEVLNELNGLKIDDQPITNELKQAIFNDLFMQKTSVSVKNIQDYLVSEKRYASRPAITGLSDEKKFNSRLSTYHDLKVIVGDAVDDVDKQADLEKCIEWSTIFEDGKIYSAKLNEITWLTEQQRGQLATKRYRGWGRLSAKLLTQIVNANGQRIMDLLWDTTDNFMRIVHFEDFDKLITEANQMVLAENDVQDVINDLYTSPQNKKALRQILLVVNDIQKAMKGQAPERILIEFARGAQKDKSLTVRRKRKLDEMYSQISDAVLADESVRQELKSSNQDDLVKEKVYLYFMQGGRDLYTGNALNIDRLSDYHVDHIIPQAYIKDDSLDNKALVSSRMNEIKADRVPLQVVQKQFGKNMASEWGYMHRAGLISRKKYDNLMFNPENLNKYQINRFISRQLVETQQVIKLVANLLSNQYEGDNVKIITVKSKLTQTIRSEFDFPKNREVNNYHHAFDAYLTAFVGMYLLKRYPKLSSYFTYGEYLKGNQQDKWSSFNFLNDLKRAKLEDKTNKEIFWHKESGLAYLNKIYQFKKILVTREVHENSGALFNQTLYAAKDDKASGQGGKQLIPAKQARPTALYGGYSGKTVAYMCIVRIKNKKGDLYKVCGVETSWLAQLKQLKDEDSQKAFLKQKISPQFTKAKKQKGTIVKVVEDFEVIAPHILINQRLFDNGQELTLGSATYKHNEQELILDKTAVKLLNGELPLAQSEELAELVYDEILDQVMHYFPLYDTNQFRAKLLAGKTAFMQLPWKSNPDDNKTVQITQPIVLKKILQGLHADAGRVSLKELGMTTDFGMLQKATGITFTPDTQIIYQSPTGLFERRVALRDL

SEQ ID NO: 222 - protein, 1362 aa, Lactobacillus hammesii DSM 16381
MNQEPYAIGLDIGTSSLGWANADMDGYIARVKGQTGLGVRLFEEGQPAADRRSFRTTRRRLSRRRWRLRLLREIFDEPISSIDPNFFARQKASSISPKDDRFETTYQLFNDKTDQEFYSKYPTIYHLRWALMTEHRKFDLREIYLAVHHIVKYRGNFLRSGNPKSFKPSELDFSQRFKEVNGLWHLIFDEVAPQLPTDNLEEITKLVLDTTRTRADRQRESVKLLMAATDNHKDWKPYLTEFTKAILGLKTKLYLLTGVDVAKADQKTWTFSLEDIEDHRADLETAFDDRSLELIEKLVDLQAAIQLTEIMPSGQYFSQSMIYRYDQHKEHLRWLKDYAEQQTDANKRKAVRLAYDHYIEGDAKGKPEIADDFYKELNRILKGDTSELAKKINHEIALEHFMPKQRTKENGVIPYQIHQQELDSIIDNQKKYYQFLGEDNPVVSHHGSQPYKIDELVSFRVPYYVGPMITADQQKKTAAGQFAWMVRKDSGDITPWNFDDKVDRTASATNFIQRMKTTDTYLIGEDVLPLQSLTYQKFMVLNELNNIRINGELLTREQKQRTYNDVFKGHGTVNVKSLIKSLECHSEVTGAIKVEGLADPKRFNSALTTYRDFKKILPVAIDQPQRQADIERIINWSTIFEDADIFKAKLQEIDWLTDTQRDRLSTKRYRGWGRLSAKLLLNIKDTQGLSIMDQLWNTQHNFMQIVHEPDYAEKIEKTNAKGLKQQDIFETINEMYTSPQNKKALRQILAVVRDIQKAHHGQAPSRIFIEAARGAEQNPQRTRQRQKQLADLFADQAKEIVNETVAQELNDETDNKARFTDRLMLYFLQNGQDMYTGEKLNIDKLSTYDIDHILPQSLVKDDSLDNRVLVSKVENLKKNDHFASELYARKMQGTWELWRSAGLISARKLKHLLMRPDEINKYATGFIRRQLVETRQVIKLVTDVLSNEYDSDKTKIISVKAGLSHQLRMELDLPKVRELNDYHHAFDAFLAVRIGTYLLKRYPKLERFFVYGQYQVAPQLDLRRFNFIHDLVSGKQEKIVAEETGEIVWNREKDVSYMKHLLSLKHLLVTHEVKEDHGALFNQTIYKAKKDNGNVGGKMKLLPTKSNRPTEIYGGHSSQAIAYLAIVRVNGKEPSYRVMGVPIRILDQLKQAKKQGEYAERLALKQFFTPDFTKGKGKIVSDFDVVIPHIPLLQPVIDEISGQSHRFALGTNTYYRNLQQLILTLADQKVLISKETGVDEEKKLVEVYSHICQQVMKFFPLYDRNKFRELLVDSRSHFEQLPIVNRYSDAGKLEIAGKRGILQQIMVGLHANATPGDLKELGVKTPFGKLQVPGGIKLTENAKLIYESPTGLFKREVKITTE

SEQ ID NO: 223 - protein, 1386 aa, Lactobacillus hominis CRBIP
MTKITEDYIVGLDIGTNSCGWVAMDSKNTILRMHGKTAIGSHLFDAGNSAADRRAFRTTRRRIKRRKWRLKLLEEIFDSHLAKVDPYFFARLKESGLSPLDTRKNVSSIIYPTSLEDKKFYVDNPTIYHLRYKLMTEDRKFDLREVYLAIHHIVKYRGNFLYNTPVKAFEASKIDVKGSLKKLNELYEGLDSEFNVELDSNNALEIENIIRDKKIFKINKVKEINQLLSLKTEDKERTKLMKDVSKQIVNAILGYKTKFETILLKDVSKDEADDWEFKLTDVDADNKFENLIGDLNENEQEILLVIRKLANAITLSNIVEEGKTLSESMKDKYKKHSDDLKLLKQVISDHPDRDKAKKLALAYDLYVNNRHGKILQAKDILEKKKTLSKEDFYKEIKKNLDDSKESQEILDAISLDSFMPKQRTNENGVIPYQLHQLELDKIIENQGKYYPFLKEVNPVSSHLKQAPYKLDELIRFRVPYYVGPLISPNESTKNKQTKKNQNFAWMIRKEQGQITPWNFDQKVDRMASANKFIKRMTTIDTYLLGEDVLPANSLLYQKFTVLNELNNVKINGKRISVPLKQELYNNLFKKNSTVTTNKLKSYLKENYKLIKVEIKGLSDEKKFNSGLTTYNKLKNLKIFDQQIDDPNYNKDFERIIEWSTIFEDKAIYKEKLKTIDWLSDRQIDKLSKIRMQGWGQLSKKLLSQLTDNNGQTIIEQLWDSQNNFMQIVNQADFKDAIAVANQNLLVDTSVEDILNEAYTSPANKKAIRQVVKVVDDIVKATSGKVPKQIAIEFTRDADDNAKISQSRANKLRKVYKEMSNELASETIRNELERVAKDQKLLKDKHYLYFMQLGRDAYTGELIDIDNLEQYDIDHVLPQSFIKDDSLENRVLVKKAVNNGKSDNVPVKLYGNRMATDLGMTIRHMWEKWKEQGLITKTKYNNLIIDPDKINKYESSGFIHRQLVETSQIIKLVSTILQSKYPDTEIIVVKARYNHYLRKRLNLYKSREVNDYHHAIDAYLSAICGNLLYQVYPYLRPFFVYGQYKKFSSEPEKEKIIYDKTRRYNFISQIFENKDNDIISRETKKKVFDKKDIIEKLKRAYNYKYMLVSRETETHDQEMFKMTVYPRLSRDTKKSRNLIPKKKDMPTEIYGGYTNNSDAYMIIARINKKKGPEYRVFGVPMRELVNLRKAEKNGHYKAYLKQVLEPEIMYSKNGKKNKTISSFEIVKAKVPYKQVILDGDKKFMLASSTYVQNAKQLTLSQYSMQAITDNCENDTEEEKALVEAYDEILTNIDKYLPLFDINKFREKLHAGREKFVDLPLAEKKETILQVLNGLHDNAVMPKIKSLGLSTPLGFMQFHTGVSLSENAKLIYQSPTGLFEKRLKISDL

SEQ ID NO: 224 - protein, 1371 aa, Lactobacillus hordei DSM 19519 A
LLYRGRYSVENNRYNVGLDIGTSSIGFAVTDEQDELVQVKGKNYIGVRLFKEGQTASERRSFRTTRRRLKRRKWRLGLLEEIFAPYLAQGDPYFLARMKESNISPRDERKKYYGSLLFSDDTVFYDKYPTVYHLRHALMTEDRKFDIREIYLAVHHIIKYRGNFLINTLINEFSSKAVDFKKDADILNDLFEQFYISDINDSFQLNTADMNEISELLLDNSKTRLDRQRESLKKLAKKVDDISVAKKHQKIATEFSKAILGNKAKFDVILNVTTDSSNDWSFKLEDEDADEKIVVLLEELNTPQQEALNIIHQWYSQISLNGIVPDGKSISEAMISSYELHKEHLALLKQQINNTKDKKKAHGLHEAYNEYVHGNNNKKLNQADFYSKVKQNLESSLITDEILELINAENFMPKQRTSANGVIPHQLHQQELDRIIQNQAKYYPFLAETNPNEKRSKVAKYKLDELVAFRVPYYVGPLITATDQKKTSGKEFAWMVRKQPGRITPWNFDEKVNKMESANTFIRRMTTKDSYLIAEDVLPDESLLYQKFKVLNELNNLRADGRKLKVSVKQKVFKELFQQQKTITIVKLQNYLKAECSFLTTPEISGLSKPEHFVSSLATYIDLKKIFGEDIDNPARQNDFERMIEWATIFEDKNIYSEKLNEIKWLNDRQKKELKNKNYHGWGKLSAKLLKGLRDSDECSIIEHMWNTQQNFMQVQAEEDFAQRIQEENNQHLKGNTLEEVLADAYTSPQNKKAIRQVVKVIEDIQKAMGGIAPQKISIEFTRAPEEKPRRSVERQQQIEKIYKSVANEVENAGVKDELQRFSDRKQTLTDKYFLYFTQLGKDMYTGKSINIDQIGNYQIDHILPQAFIKDDSLDNRVLVSAAVNNGKSDNVPTKNDRYKVREHGQRLYDQGLISKRKFNNLITDPDSINKFTARGFVKRQLVETSQVIRLVAEFLYNKYQSKSEIIEVRAKMNSQLRKDFGLIKNRNVNDYHHALDAYLTTFIGNYLYRRYPKLRAYFTYGCFKKVDDSQLKYFNFLHDIEDDKKKIIKDNDTGEILWHRDEGIARFKRIYNFKYMLVTHEVLTRQGAMFKQTVYSAAVAGSKKLIPVKEDRPIDIYGGYTNNNDAFLAIVKVTKKKQYMVVGIPQRAVVKLNDAAKQGSKAYQKVLYNVIKPQFIKKKKDRKTGKITQKLENFEIVVSKTLYRQLIIDGDQKYMLGSSAYKYNAKQLVLSEYALEVLDRSIFEKKEYTTVDLDNVYDEILAQVDKYFSLYDKNKFRQKLHESRKIFTELPINNLFSGTKLLKSGKRETLNEILEGLHANATKKDLKSLKFSTPLGMIQYPSGIILSENAILCYQSPTGIFERRVTLKDL

SEQ ID NO: 225 - protein, 1170 aa, Lactobacillus hordei DSM 19519 B
MSKYNVGLDIGIASVGWSIVDADKKKIIDLGSRIFSSGNAAANQERRGFRGTRRLIRRRKNRLTDVINFFGEKKFIDTKVVDKNGHVHYKFSVNNTESPYELRVKGLSEILTKQELVIALYHIVKHRGISYDLGDLEDDGTSGVTDYKTSININRQLLNEKTVGQIQLERLNEFGKVRGQVEENENVTLLNVFPSAAYVKEATQILTKQREFYPEITDDFIAKFMLFITRKRDYFVGPGNEKSRTDYGIYKKDGRTLDNLFDELIGIDKINGEKRASASSLTAQIYNMLNDLNNLTVPNTEDGRLTIQTKKEILEAAKTTNGLFGIAQICKIIGCKKDDIKGFRIDKSEKKIMHTLSGYRKFRKELADVNIEANDLNINLVNKIADILTLNTEKAEIRKQLDKSNMDISNEMKEIVINKNKEFLVDGRATWHSFSYKTLNLLIPELLNTPEEQMTILTRLGLVKPNNKKYEGLKNIPARRITEEIYNPVVARATREAVNVFNAITKKVGRDNIKDVIIELPREDNEVDIKKGIVKRQKQNEVEKETADALVKQHMTISDSALIAQYRKIRGLSQKVRYWYQQDTICPYCGKKIEAVQLINNNDSFEVDHIVPISVSFDDSQNNKVLVHSQCNQAKEKQTPLGWLNNGGGFGQSKADYIARVKSNKNYAKNKIDNLLNETDLNDIATQRGFIQRNLNDTRYASRIVLNEFYSFFRSNNLSTKVKVVRGKWTSQMRKKWNGVGGLSKTRDTYHHHAIDACIIACFPLLKAFDKAIKLIDVDGETGEILQDKKAIKLAQEAEIVEKISVIKNKKFENMVNEIYNFPLFKQVELANDITNLENPVKFSHHVDKKANRAVANQTIYGTRIKEKEVTKRGKKEKIQERYTLGTIKNIYDIDGFMNFKKLYDKISKNDDVKFLMQKNDPKTWEKLIDIFNSYPDSEEVTQVDGKVKRVAVSPFKLYYRENGFITKYSKHNDGPKVVSIKYYDSKVGSHIDITPKDARNKVILQSLKPWRTDVYFNSITQQYELLGLKYSDLKFTNGVYGITRDAYEKLKHGVSEDGVTAWKPISKNSEFRFSLYRNDRVRVIDEKGDSIELLFASRTTSNEGYVELKPIYKAKFDSKEEVGFYGLVSNGRLIKKMSKGGYKLYKVNTDILGKPYYVTRESDEPKLSL

SEQ ID NO: 226 - protein, 1395 aa, Lactobacillus jensenii DSM 20557
MKEIKDYIIGLDIGTNSCGYVVTDKQNNILKLKGKTAIGARLFKEGQAAADRRSFRTTRRRLARRHWRLGLLEEIFDPEMEKIDPNFFRRLKESDYSPKDSRKQFNAIVFKSIKADKRFYKKYPTIYHLRNALMHDNQKHDLREIFMAVHHIVKYRGNFLREDSVNAFKAAKFSLRGEDGIGPVDKLNDLLKEIYSEYSPELATNNLSKIEDIIKDKNLYKQDKLKQVATLLIKEADSKDKAKLNKDIAKQVANSFMGYMFRLDTLFSLTDVDVKDYKLKFSDANIDESLDDLTSLLTDAQIEFVLELQSIYNTIVLNEIVPDGMSLSESMIKKYDDHKEDLKIFKEYIDSLSDQKKAKKLLSAYNLYVNYRKSDLVEAKNLFKNKKVGDKNFADVISNFEVFGKFVSDNLDDSELANKIKARLDLGEFLPKQRTNQNGVIPYQLHQVELTQILEKQGKYYPFLITPNPVESHRNNAPYEISELVSFRVPYYVGPLIDNQSIKDKQNKNKFAWMVRQKQGQITPWNLEEMVDTTESANQFIKRMTRKDTYLLAEDVLPKSSLVYQKFMILDELNRIKIDGKKLTSELKHDIFEKLFKKQKSINLDNLKNYLLVEGNIPGLIEGLSDGINFNNSFSTYIDYRNIFGDEIDNPNKQADFEKMIEWSTVFEDRKIFKRKLKEITWLTSEQIKQVSSKRYSGWGRLSKKLLTQITDENGVNILQRLWNEPETLTEVLANPVIKRKIVEANSSFTKAKDMKDILVEAYTSPQNKKAIRQVMRVVDDIIAAAHGKKPSQIAIEFAREDQDNPQMTKSRKAQLDQIYAKISDEFLDDAVKNELKNMKDNKPLAKDKVFLYFKQMGRDAYSGEKLSLDNLQDYDIDHIYPQSFIKDDSFDNRVLVQRAYNNGKSDNVPVLLFGNKIAAGLGITIRQMWKKWLELGLISKRKFNNLITDPEKISRNMASGFVNRQLVETSQVIKLVANILQAKLPDTEIIEVKASYNSILRKEFNLYKSREVNDYHHAIDAYLTTIVGNYLYQVYPKLRPYFVYGQFKKFGKAENQEDDPVKKIKKFNFIYQLIWGKDDAICISHTNQQVFSKKDIIDKLTTAYNFKYMNISHAVYTRNNNMFKQTLFPIIERTTAKTKSLIPKKLDRPTDIYGGYSNNNDAYLALVKVDKKRGSEYRVVGIPMRAAAMLKASKNYDEDLRKVIEPMVMFDKNGKAKRGIEGFRVLVGKMPFKQAVLDGNKKFMLTGTVDTPNLKQLVLSQQNMKYILDYIEDVDCRKHKFGDKVQNPDKCLLEVFDEIIEIVDKYFELFDSRDFREKLRNSRNKFIKLEASKKADTILAILKGLQAKSTRATIKELNISDFGRIITSSISPEAQLIYQSPTGLFERRVKVKDL

SEQ ID NO: 227 - protein, 1375 aa, Lactobacillus johnsonii DPC 6026
MTKIKDDYIVGLDIGTDSCGWVAMNSNNDILKLQGKTAIGSRLFEGGKSAAERRLFRTTHRRIKRRRWRLKLLEEFFDPYMAEVDPYFFARLKESGLSPLDKRKTVSSIVFPTSAEDKKFYDDYPTIYHLRYKLMTEDEKFDLREVYLAIHHIIKYRGNFLYNTSVKDFKASKIDVKSSIEKLNELYENLGLDLNVEFNISNTAEIEKVLKDKQIFKRDKVKKIAELFAIKTDNKEQSKRIKDISKQVANAVLGYKTRFDTIALKEISKDELSDWNFKLSDIDADSKFEALMGNLDENEQAILLTIKELFNEVTLNGIVEDGNTLSESMINKYNDHRDDLKLLKEVIENHIDRKKAKELALAYDLYVNNRHGQLLQAKKKLGKIKPRSKEDFYKVVNKNLDDSRASKEIKKKIELDSFMPKQRTNANGVIPYQLQQLELDKIIENQSKYYPFLKEINPVSSHLKEAPYKLDELIRFRVPYYVGPLISPNESTKDIQTKKNQNFAWMIRKEEGRITPWNFDQKVDRIESANKFIKRMTTKDTYLFGEDVLPANSLLYQKFTVLNELNNIRINGKRISVDLKQEIYENLFKKHTTVTVKKLENYLKENHNLVKVEIKGLADEKKFNSGLTTYNRFKNLNIFDNQIDDLKYRNDFEKIIEWSTIFEDKSIYKEKLRSIDWLNEKQINALSNIRLQGWGRLSKKLLAQLHDHNGQTIIEQLWDSQNNFMQIVTQADFKDAIAKANQNLLVATSVEDILNNAYTSPANKKAIRQVIKVVDDIVKAASGKVPKQIAIEFTRDADENPKRSQTRGSKLQKVYKDLSTELASKTIAEELNEAIKDKKLVQDKYYLYFMQLGRDAYTGEPINIDEIQKYDIDHILPQSFIKDDALDNRVLVSRAVNNGKSDNVPVKLFGNEMAANLGMTIRKMWEEWKNIGLISKTKYNNLLTDPDHINKYKSAGFIRRQLVETSQIIKLVSTILQSRYPNTEIITVKAKYNHYLREKFDLYKSREVNDYHHAIDAYLSAICGNLLYQNYPNLRPFFVYGQYKKFSSDPDKEKAIFNKTRKFSFISQLLKNKSENSKEIAKKLKRAYQFKYMLVSRETETRDQEMFKMTVYPRFSHDTVKAPRNLIPKKMGMSPDIYGGYTNNSDAYMVIVRIDKKKGTEYKILGIPTRELVNLKKAEKEDHYKSYLKEILTPRILYNKNGKRDKKITSFEIVKSKIPYKQVIQDGDKKFMLGSSTYVYNAKQLTLSTESMKAITNNFDKDSDENDALIKAYDEILDKVDKYLPLFDINKFREKLHSGREKFIKLSLEDKKDTILKVLEGLHDNAVMTKIPTIGLSTPLGFMQFPNGVILSENAKLIYQSPTGLFKKSVKISDL

SEQ ID NO: 228 - protein, 1341 aa, Lactobacillus lindneri DSM 20690
MTQKVIPYNIGLDIGTNSVGWAVTDNENKLLHIKGHNGIGVRLFKEGQSAAERCGFRTTRRRLSRRKWRLRLLNEIFADKIAKVDPSFFARLKQSNVSPKDPNKTMFGNILFDNGNLNDKSFHDEYKTIYHLRQSIIDHPEKKFDIRLIYLAMHHIIKYRGHFLNQANVQDFKGGKIDLEESFKDLNSIFENQGRDLRLVTEDANKYVKELSDNSKTRNDRQKELSKVLYIPIDKNSDKNNKKVTTEIIKAILGMKAKFDVIFGIDAENAKEWSLTFNSDDFDDKIEGLSAQMTDEAGEILLILKELYFALNLSDILNNSVTDKNAKTLSEAMINRYDDHKEQLTMLKQVIDNSDKKHAKALKAAYSAYIDGENNKKISFEDLRKRIQKNLDNSETSKKINDLLEHDYFLPKQRSKENGAIPHQLQQQELDKIIESQKHYYPFLAELNPNEKRSRQAKYKLDELVAFRVPYYVGPMVKATENNQSNNGKFAWMIKNDNISDKLKKEEITPWNFDKKVDRTETATKFITRMTTTDTYLIGEPVLPKNSLLYQKFVVLNELNNLKINKQPITPEQKQYVYEHVMKQTKRVSLKKIADALVIKGDYPYAPEITGTTDQKNMNNGLSTYIDLAKIFGDELDDIDRKEDFEKIIEWSTIFEDQHIFALKLKEIKWLTEDQRKQVVKLRYQGWGKLSKKLLADLVDDNGQRIIDLLWDSKQDFMQIVNQNSFKQAIAEHNGAHLEEKDLKDIINNLYTSPQNKKAIRQVILVVDDIIRAVGYEPVNIMMEFAREDSKDHRLTNSRSRQLEKVYKDITNSWFDDDNVKDELKDKIKDKAKFTDRLYLYFTQGGKDLYTGEPLDIDNLSNYQIDHILPQSFILDNSLDNRVLTSKINNQIKKDNLPGEFFGSKMHNFWKHLKELHLISNKKYYNLTLTPNSISKFNNQGRFINRQLVETRQVIKLAAEILHNRYSEENGTNIVTVKANLTHHMREKFNFYKNRNVNDYHHAFDAYLAAFVGNWLLQQYPKLKPYFVYGDFAKTEIDNLKSFNLIYKFEQAHQLNEEDGKIAKDTDALLGYMKNVYHFKKMLVTKELETNHGNLFKQTLYPSHGKMKNLINPKENRSSDIYGGYSSETGAYVSLIKVFKKNKIENKIIKIPLLYIDKLNRQANAKQFIRNFIIKDDSNKFDILSEKIFLNQLVIDGDELFTISGSGDRQNAQQLILSDKSLKILSKNINVISKNDLIIIFNEIIDDICKYMKMYEVENSDETKAKFEEINDKDRMLKIINDLLLGLHANASRSNLSSIGLSPSFGRFFSGNAGIKLSENAKFIYQSPTGLFSRKVKISDL

SEQ ID NO: 229 - protein, 1174 aa, Lactobacillus mali ATCC 27304
MGKYSIGLDIGISSVGWSIIDIEKKKIVDLGSRIFPSGNAAANQDRRGYRGTRRLIRRRKNRLADVINFLGEENFIDTKVVDQNGNIHYKLLVNSTESPYKLRVKGLSKMLTKQELVIALYHIVKHRGISYDLGDLEDDGTSGVTDYKTSININRQLLIKKTVGQIQLERLKEFGKVRGHVKKDENITLLNVFPSSAYVKEATQILTKQREFYPEITDDFITKFIPFISRKRDYFVGPGNEKSRTDYGIYKKDGRTLDNLFDELIGIDKISGEKRASASSVTAQIYNMLNDLNNLTVTNTEDGKLTTQTKREIIEADKTTNGLFGITQICKIIGCKKDDIKGFRIDKVEKPIMHTLSGYRRFRKELAKINIEANDLDINLVNKIADILTLNTEKAEIRKQLNKSNIDVSNEIKELIINKNKDFLVDGRATWHSFSYKTLNLLIPELMNTSEEQITILTRLGLVKSNSEKYKGLKNIPARRITEGIYNPVVAKATREAVNVFNAIAKKIGRDNISDVVIELPREDNEADIKKGIVKRQKQNELEKEAADALVKQQMTISDSALVAHYRKVRGLSQKVRYWYQQGTCCPYCGKNIEAVQLINNNDSFEVDHIIPISVSFDDSQNNKVLVHSQCNQAKGKQTPLGWLNNGGGFGQNKTEYVAKVKTNKNYSKNKMDNLLNDMDLSDIVTQRGFIQRNLNDTRYASRIVLDEFYSFFKSNNLSTKVKIVRGKWTSQMRKKWNGVGGLKKTRDTYHHHAIDASIIASFPLLKVFDKAIKLIDIDRETGEILQDKEAIKMSQEAKLLEKIPVIQNEKFEELINELYDFPLFKQVELANDITNPENPVKFSHHVDKKANRSVANQTIYGTRIKEKEINKRGKVEKVQERYILGTIKNIYDIDSFTSFKKIYDKMSKTGDVKFLMQKKDPKTWGKLVEILNSYPDSEEITQVDGKVKRVKVSPFELYRRENDFITKYAKHNDGPKIVSIKYYDSKIGSHIDITPINAKNKVVLQSLKPWRTDVYFNSETRQYELLGLKYSDLKFTNGVYGITSEAYEKLKHGISEDGTKTWKPIGKNSGFRFSLYRNNRVKIVDEKGESLELLFASRTTSNEGYVELKPIYKSKFDSKEDVGFYGQMTPSGQFVKKMARVGYKLYKVNTDVLGNPYYITKESDDPELSLYKK

SEQ ID NO: 230 - protein, 1357 aa, Lactobacillus mindensis DSM 14500
MNDRNKKYNIGLDIGTGSVGWAVTDNNYNLLHAKKKNLWGIRLFDGAETAASRRTFRSTRRRYRRRRNRINWLNEIFADELAKKDQSFLVRMNSSWVSKKDKIRQRDQYNLFMDSDYTDVEYHREFPTIFHLRKRLIEDKSQADIRLVYLALHNIIKYRGNFTYEHQNFDVSHMDSGLALLLNQLNQQLQAFEVAFPDETNFESMSTILLEKKTPTQKIDEIVDQIQPEKDLLQITKNIMKMLLGNKADLVKIFSLDSDDKITVEFSSNSIEQDLSNLEETLSDEQFNIITLANSIYSSIVLNDILSGETYLSFAKARQYSDHKKDLAKLKTMWRESPDRKAVGKAKKAYDDYLHSGKYGIEDFYKDMSKFLETATPVELAKEANEKILNKSYLLKQRNNENGVIPFQLNKNEMIEIINNQAKYYPFLAENKDKLLSILSFRIPYYVGPLQSKKDNPFAWMEKKSQGKIRPWNFDEIVDREASSNNFIRRMTSTDTYLIGEPVLPLKSPIYQKYEVLNELSNVRINADEVDNPLGDKLSVDLKQAIYNELFLKHRSVSKALLTKWLINQSYFQNPQISGLADSKKFNSGLTTYHDFKKIFGEDFVNDPTNQSQLEQLAEWLTIFEDKKILKIKLDDSQFNCTPEQIKKIAGMRYQGWGRLSKKLLCDIKTTTVTSKNHQQASYSILDLMWNTNRNFISVLKNDTYKFEDKIQTFNLDKNEAATPQAMIDELQTSPALKRGIRQSVTIIQELVKFMGHAPEHIFLEFTREDDVSSLTKSRDSRLNKLYARIAKNTKKTDDELKKSLLPSSDIKATLKANKNNLSNDRLMLYYLQMGKSLYSNQPLDINRLSEYQIDHILPQSYIKDNSLENRALVLASENQHKSSDLLLKPEIINQNIARWRYMKDAGLMGPKKFKNLTRIQITDSDQNNFINRQLVQTSQIIKHVSNILDSMYGDQGTQCVETRAHLSTEFRKAFSNEDDNYHFQHPEFVKNRNINDYHHAQDAYLACLLGLYQMKKYPTDNMILLKKEYKRFFSNTKKIYDKKHHFPDYVKNGWIIGSMFNGEKYVDEETGQIIWDQQTKDMVSCIFQYKQYNVTKRTEAANGEFYNQTVYKKDPNEKRKLISLKQGLDTKLYGGYSGDNPAYIVLVKIDDKKNKLVKMPIRLAEQVDNKTIDLQTWLEENVPHKKGIQVLKTKIPLGQVIYSKKNGYLALKSDTEIVNAQQLVLPYGYVALLTLLQKMPENKYDEVLACYDDGILDNIFVAIIDKMKHFYPYYSGELKTLSDNIDNFKESPDVNKIKTLQQLLLLLHASSTTASIEFNNVKKNSLGRKPNSINIQNTDLLSFSATGLYESRIHID

SEQ ID NO: 231 - protein, 1382 aa, Lactobacillus mucosae DSM 13345
MDIGTNSIGWTAIDDHFSLLRVKGKNAIGVRTFKEGETAADRRGFRTARRRLSRRRWRLQFLDEFFAPYLAEVDPNFLARLKQSDISAKDPAKNQEYMGKLLFPDQEAASDGNGYPTLIQMRKAMPAEKAADFPVFNIYQLRYALMNEKRKFDLREIYLAVHHIVKYRGNFLNNTSVDKFKADQIDFNKSFETLNDLFRQVQPIAPFQIDLTKVDELGKLLLDTKQKKLDRQKAVAKLLPLIEDGTDKEIVKAHQQTAREISKLILGYKAKVGLILQNNLDQTLDMSTENSDDQLMQIAEELDDYQMELINQLSLLYSQIMLNEIVPNGETVSASMLNRYYKHRCQLKELKDYGAAQDKKTREQLDHLYAEYIGQIPKDSKFDFTKDLKKLMDKSDLGQKIKDEIEAGDYLPKQRTSANGVIPHQMHQQELDQIIENQKEYYPWLAEPNPVEKNIKNAKYKLDQLVSFRVPYYVGPMITLADQQKTSKASFAWAVRKKAGKITPWNFYDMIDREKSANNFIKRMTNKDTYLLSEDVLPASSLLYQKFTVLNELNNIRVNGRKLQPALKQAIYTDLFQKRKTVNLKTLTNFLAIHEPTLTKPKIEGLSNGRSFNSSLGTYIDMSKILGDSLDDLNYRDDIEKIIEWSTVFEDSEIYGVKLQEIQWLTNEQREKLVRKRYQGWGRLSKKLLTGITDENGQRIIDLMWDTSKNFMQIVHQPVFEEQIAELNQQLLQDADKAPLEVVDDILADAYTSPQNKKAIRQVVKVVADVVKAVGNAPASISIEFARNEDRNKELKNSRRHSIEKLYHETAEKLVKQTNLLEELGNVKDLNDRYYLYFTQAGRDMYDGTPINIDEISTHYEIDHILPQSFLKDNSLDNRVLVKKSENAAKSDRVPAKLYGAKMRAFWKQLKESQLISNRKYLNLTTDPEQVDKYQMQGFVHRQLVETRQIIKLAANIFGSLYPDSAVIETRAELTKQLREKFSLYKVRDVNDYHHAVDAYLTAFAGHYLYQRYPKLRPMFVYGDYAKIYADDLKRLRSVNLFHDLEKDQYNSGTAVNPETKEKIVDVDWLSDYVSKIQHFKYMLISKAVYTQHGQLYGATILPVAQVDKISAPIGIKDDKPVDIYGAYTNEVAAYMAIVRVNGKKPKYKVVSVPVRMLQRLKMAEQKGHDQYMQTLHDVLLRNFTSLKKNRKTGLKEAVVKDFDVLVPCVRYNQLVIDGDTKFTLGSATYQHNAKQLVLCNHSLETLANNFEYVRKHPDEADERMIMLYDDILDQVNHYFTLYDKNKFREKLNAGRDKYLKLPTFSQFENNKKTAIGKSEAIINILRGLHANAAITNLKCLGVSTPFGQLQSPSGIELSENAKLVYQSPTGLFSREVLLKDL

SEQ ID NO: 232 - protein, 1376 aa, Lactobacillus namurensis DSM 19117
MDKKYGIGLDIGTSSIGWTVVDKYGHIIRVKGQTGIGVRLFREGQTAAERRTFRTTRRRLSRRRWRLRLLREIFDEPISAIDENFFARQKASSLAPGDARYQQAFQLFNDRTDQAFYCKYPTIYHLRQALMTESRQFDIREIYLALHQIIKYRGHFLLGGAAKDFQSDKLDLEAYFTTINAQLAGIYSDGSVQLPTLDWNQACQELTDTSRTQSDRKNWLVKELKSYGDSQLKPIYTQIANAILGFKTDLAKIMGINDPEKALSFNLDALDDHRDDVAELLTDEQIPLVNLLAKLHTALELAAILPDGQTLSGKMVEIYETHRKQLKTYKAFIRQLPDRQQRLALKQAYDHYIDQGLNREAFYSEVKAILEKQKPLTATGQAMKKAMDQNAFLLKQRTKTNIAIPYQVQQQEMDQIIANQSKYYPWLATPNPVKSRRVIAPYKLDELVCFRVNYYVGPLVQSKPGEATKEAKFAWMTRKDPQSTVAITPWNFDQQVDRQASANAFIQRMKTTDTYLLGEDVIPKNSLLYQKYEVLNELNNVRVNGDWLDPQRKQYLFKKLFMDQPQSVVTVKALQKTLVVIGACPTLPTVEGLANPKRFLSQLTTYHDFCKLLPDDIQRADRQADIEKIINWSTIFEDTAIFKEKLRDIKWLSADQIRRLSSRPRYRGWGRFSAKLLCGLHDRQGNTVMDELWQTSRNFMQIIRQSDFQTAIAAVNQQDLGRQDLQRVIDDLYTSPQNKKAIRQVLAVVTDIQKAMHGKAPSWLFVEVAKGAQKNPQRTQSRQSKLAEAYRESARELVDEAVKEQLLTLPDDRQTFSDRLVLYFQQNGRDIYTGEPLDFERLSNYHIDHIIPQAVVKDDSLDNRVLTSNQANLEKGAHVPTIFRDKQEPVWQELYRVGLISHRKLRNLLTTPDDLDDRGRATGFIARQLVETRQVIKLVMEVLSQYYDTTETELISIKAGLSHQFRQELNLPKLRALNDYHHAQDAYLAARIGTYLLQRYPNLKRFFVYGDFKKTHFDLQRRFNFIGGMISREKQPYNLIKNPVTHQVIWDEEMEIGDCQKKNPEQPKHDATVKMMNLTKIMNLKHILVTHEVYENHGALFNQTIYPASQAHKKKLIPQKTEKPIELYGGHSSEQAGYMAIIRLLGKRPGYKVMRVPVRYVSQLQHQDVAEQKKLLYKIFVSELTSRNKVKPFEVVVPHVCLNQPVEDMIKGQWHRFALRTNGYYQNQQQLILSLVAQRTLAGYKPKDDELMAVYHEICKQVKYYFPLYKMNKFQSRLFAAEELLQKRSTVNSFSITIGKNGKENKTLNLGKRELLLRLLGGLHANATRVDLKDIGCTGQFGQLQVKNGIKLTEQAVLIHESPTGLFHRRVRLNDL

SEQ ID NO: 233 - protein, 1137 aa, Lactobacillus nantensis DSM 16982
FYFKIRLSEVVIMADRISLGLDIGVASVGFSVLNIDQGKVVELGARLFNAKVAEGNQDRRSMRGSRRLLNRKKQRRQDTAKLFEEFGLISNYDKDNFSEFFDNNENPYELRVKGLTEKLTKNELAESLYQIVKRRGISYDLKDADFEDGGTDYSSSLSLNNKALEDKTPAEIQLQRLNEFGAVRGKVVVGDDLDNQKVLLNVFPTKEYKKEAQRIIATQREFYPDILTDEFEKQYCSILTRKRDYFVGPGNEKSRTDYGIYKTEGRTLDNLFEELIGHDKVYPDELRASAASYTAQLFNVLNDLNNLRILSYEDEKLTQADKETIINELKSNVTTVNMMNLIKKVSGCEKDDIKGYRTNDKDKPEISSMAIYRKTHKEFLKADVDITQPIEFINELSFILTLNTENGEIRKQIVKKLKPHYDFVDDNLIQKIIDHKDSFEISTNNKWHRFSIKTMSQLIPIMMERPIEQMTLLNELGLVKKDSKRFANNKYLPYREIANDIYNPVAAKAVREALKIVNASLKKYGHIDYLVVEMPRDKNLDEEKKQIEDFQKKNKIAKDEAYRAFVTAVGDEKTVKIALSKSRKLQMEMRLWYQQNEIDPYNGETIEAVDLIRNPDKFEIDHIIPQSISFDDGINNKTLCFASMNQVKGQKTPMEFLNEGHGQGWAKFKAMVSGNPRFGKSKKQNYLFAENVSDIETRKRFISRNLVDTRYSSRVVLNSLQEFFSEKSDGTKVTVIRGKFTSNMRKHWHIDKTRETFHHHAIDASIIAATPFLNMWKKGGSIFPVKVGEESIDIDTGEILDDKKFDKIMYEQPYNGFVTEIMNADDRIKFSHQVDKKMNRKVSDATIYSTRIGQLVKDKKVAEYVVAKVKDIYSVDGYKKFRKVYDKDKTKFLLYTHDERSFSELEKVLYMYPDKIDQTQNNGKVKSIDISPFELYRRDHGMVKKFSKKNRGPVIKQLKYLDKKLGSHIDITPANANDKHVVLQSLNPWRTDVYLNHEIGEYEIMGIKYADLKFNKNGEYGIKRDKYIEIKEREKVSKNSEFMFTLYKKDRIKVENMDNKENIELLFWSRNMSNNGYAELRPISKTVNDGTIPIYGKGRLIKRLIPKNCKIWKVNTNILGDPYYVEKESENPKDILD

SEQ ID NO: 234 - protein, 1132 aa, Lactobacillus nodensis DSM 19682 A
RNLENKISLGLDIGVASVGFSVIDAQEGKVLELGARLFNSSVSAENQTRRDMRGSRRLSNRKKQRRKDVAQLFKTFGLINYFDKENYFDNFQNNLNSYELRVKGLSEKLSKEELVNSLYHIVKRRGISYDLADADTDFDGSDYSSSLNQNQLELQTKTPAEIQLTRLNVHGAVRGKVTINGEDEDTMQVLLNVFPTKSFVSEAKKIIQTQQQYYPDILTDIFETKYLEILERKREYFVGPGSEKSRTDFGIYKKDGRTLDNLFEELIGHDKIYPDELRASGASYTAQVFNVLNDLNNLRISSYENGKISTEDKIKIVEDLRNNIGNVIIMKIIKKVAGCEDDDIKGYRLDSKDKPDIHSMAVYRKVHRDLLKYDVDIIKWPTEFIDELSPILTLNTENGEIRKQMVNKLQPKYSFLTDELIQVIINNKSSFDVTSNNKWHRFSLKTMNVLIEEMFRRPVEQMTLIQELGLIKDSGKRFENCKLLPYREISKDIFNPVASKSVREALKIVNAVMKKYGQIDYLVIEMPRDKNEEEMKKQIEKFQKENNKQKDEAINEFVKKIGNKNAVDDGLRRYGGKLYFKIRLWYQQDGIDLYNGKVIEPFDLLNNINKFEVDHIIPESISFDDSINNKTLCYADMNQIKGQKTPFEFMNEGHGQGFAKMKAMVNKNSKLKGKRKNYLFDENISDIETRKRFISRNLVDTQYSSRVVLNSLQEFFKEKETGTKVTVVRGKFTSNLRKHWHINKTRDTFHHHAIDASIIAATPFLRIWKKDASLFPMHVSENTVDIETGEILNDTEFKKDFYGLPYSSFIEELNGADDRIKFSHQVDRKMNRKVSDATIYSTRKGMLNKDKEETDYVLGKIKNIYDVSEYNKFKRIYDKDPNKFLLAHHDPKSFDELRKIMQEYPSKIDKVMTNGKVKSVDISPFELYRRKHGMVQKYSNKNKGPVIKQLKYLDKKLGSHIDITPKDTLNDRHVVLQSLKPWRTDVYYNSVTGEYEIMGIKYSDLKFNGGEYGIKMSKYLEIKEREQVSDESEFLFTLYKRDRIQIINCENDEIVEMLFWSRNNSNIGYAELKPVYKYKTEDESWPVYGYGKNQILKRLVPKNCKILKVNTDILGNPYYIKKESKNPKNILD

SEQ ID NO: 235 - protein, 899 aa, Lactobacillus nodensis DSM 19682 B
MNRKTTKFNIGLDIGTGSVGWAVTDDNYNLLHAKKKNLWGVRLFNTAETAADRRLNRSARRRYRRRRNRLNWLDEIFADELFQADPGFLNRMKHSWVSKKDTARTRDEYNLFIDKEFNDKTYFDKYPTIFHLRKHLIEDTQKADIRLVYLAIHNILKYRGNFTYEHQNFDVSKMNEGLENTLSNLNNSLDLFGLKLPDDADFKKISEILLEKDWSPSSKVSSIITLLKPEKDMKQLYKQIFTLLVGNKADLTKLFNIDSAEKITISFSSNTIEADLSDAQEKLTDEQYAIVEMANPIYSTIVLNEILNGETYLSFAQVTKYENHHEDLMKLKDLWRNDSDRKAVKKARLAYDKYLDDGKYNLDDFYKDLKKYLSTKEDPYSQSALEKMENHQYLLKQRTSDNGVIPFQLNENELVKIIDNQSQYYPFLKENKDKILSLINFRIPYYVGPLQSEDKSDFAWMERKANGPIRPWNFDEKVDREKSSNNFIRRMTATDTYLIGEPVLPKYSLIYQRYEVLSELNNVRIKSTGEESDKGSRLNVDVKQRIYNELFKKHTTISTKRLTDWLRKESYYSAPEIHGLADKTKFLSSLSSYRKLAKIFGNDFVDDSKNLKQLEEVIEWQTVFEDRQILKLKLKNSKLYTDDQIKQLAAIRYQGWGRFSNKLLTQLLVETKVNGEHMPSNHSILDLMWQTKSNFMEIIREDKYNFEKQIKDYNVGDAADKKPLDLVNELPGSPALKRGIWQAIVIVQELSKFMKHAPEHIFIEFTREDQDSGITKSRYNQLDKKYKNIGDMVRNLAPKLKNTLYLKAQLKDKKDALSNERLCCTSYKWVKAYTVKPRLISTVYSRQIIKLITSCHSHISRTIHLKIRLWSKQVKTKENSMTYSYQTMSLPTTFNVGNN

SEQ ID NO: 236 - protein, 1357 aa, Lactobacillus oligofermentans DSM 15707
MAAKNYNIGLDIGTSSIGWAIVDDNYQLMHAKGKYGYGTRIYSEGQTAADRRGFRTTRRRLNRRKWRLRLLQDFFEPYILPQDEAFFIRQKQSNLVPQDTKKQYPESVLFDDTSDKDFYTEYPTIYHLRQALMTENRQFDIREVYLAIHHIVKYRGHFLNNAPVKTFKSGNLDLAIKFNELNEEFKSVYPDLELQFNLDQIDEIKKILLDSTKSRFDRQGEAVKLIYTVSEVKTIEKLQNKIVKQFLSGILGLNTRFDVLTNTESDDSMWKFSLDSESSDDALDEIIAQLDDPAIHVVELVNEIHSSITLAGIVPEGQGLSESMVEKYEAHKAHLQLLKAVEKLVDKKAADKLEVAYDQYINGKDSKQFIKEDFYKAVQSEIKGVAGDEVAEINQLIELDQFMPKQRTKENGAIPHQLHQHELDVIIENQSKYYDWLGEKVGNEYKLDKLVSFRVPYYVGPLVDTASKEKKDETRFAWMVRKNPESTEAITPWNFEDIVDKNASAENFIKRMTTKDKYLLNEDVLPKCSLLTQDFEVYNELNNIRVNGEKFTAEQKQLIHDELFTKHASVSIKQLKDFLVSELMYVRDNLKVEGLADEKKLMSSLSTQFDYQKIIPDQINDVKYREDIEQIIEWSTIFEDAAIFKTKLKEIDWLTDEQRNKLANKRYRGWGSLSKRLLACLVDENGQRIIDILRDSSDNFMMIVNRPEFKQAIFDENANLTETNSKKDMFEMIDNFYTSPQNKKAIRQVLLVVQDIQNAMGGVAPQKIFIEFAREDEVNGRRTNSRYSQIREMYSKVTDDVINKTVRGELEANKGSLNKEKLFLYFLQGGIDLYSGKTINIDNISSYDVDHVLPQSFIKDDSINNKVLVNAKGNRVKNDNVPMELFGAKMYPTWKRMVDTGIMSKAKFKNLTLNPDNVDKFKAEGFINRQLVETRQIIKLVAQILNDKLGDDTKIVSVKANLTHDMRVFFDFPKNRNVNNYHHAFDAYLSAFVGTYLYKRYPKLQPYFVYGEFKKMDKLKNMTSFDFLRDLKHTDKVVDKDTGEIIADKLAVITNMNKIYDFKKVLVTHEVHENSGAMYDQTLYPAKLDKSLGRKGAKQLIPKKDDMPTALYGGYTGSKDAFMSIVRLKKKDEVYYKVIGIPVRIADSVQHGKEVDVEALTQFIETKFTKENLNKKTGEITRKVEWFELVLPKVLFGQAVFDGGQPFMLGSSTYPHNLRELVLTKDSVKKIAGKESNKSYLDAYDEIMEAMNKYFPLYDTNKFREKVIEGRSKFIDLPDKDEYENNKLVQVGKSTIIDRMFIGLHANAARTDLKNIGITTPFGFMQQASGIKLTKDTVVLFQSSTGLFERKVALKDL

SEQ ID NO: 237 - protein, 1395 aa, Lactobacillus otakiensis DSM 19908
MVISSCIIGDVPKGVTGQHYFEEFYRMKVNNYHIGLDIGTSSIGWVAMGEDGKPLRVKGKTAIGARLFQEGNPAADRRMFRTTRRRLNRRKWRLKLLDEIFDPYITPVDSTFFARLKQSNLSPKDSRKEFKGSMLFPDLTDKQYHLDYPTIYHLRHALMTQDKQFDIRMVYLAIHHIVKYRGNFLNSTPVDSFKASKVNFDDQFKKLNELYTAINPEESFQINLANSEKIGQQFLDPSIRKFDKKKQIPKIVPVTMDDKAVDKLNGKIASEIINAILGYKSKLDVAVQCDPEDSNPWAVKFDDEDIDAKLQKILPEMDENQQSIIGIIQDLYSQVTLNQIVPNGMSLSESMIKKYNDHHDHLKLYKKLIGQISDSKKKTALKKAYDQYVGNDGKVIEQDDFYSSVKKNLDDSELSKQIMDLIDADKFMPKQRTSQNGVIPHQLHQRELDEIIEHQSKYYPWLAESNPNKHDLHLAKYKIEELVAFRIPYYVGPMITPEDQKKSGAAVFSWMKRKEPGQITPWNFDEKVDRMESANKFIKRMTTKDTYLIGEDVLPDESLLYEKFKVLNELNMVRVNGDSLKVADKQAIYQDLFENYKHISVKKLQNYIKGKTGLPNNPEISGLSDPDQFNNSLGTYNDFKKLFGDKVDDPDLQNDFEKIVEWSTVFEDKKILRAKLNEITWLTDKQKDDLESSRYQGWGRLSKKLLTGIVNDQGERIIDELWNTNKNFMQIQSDDDFAKRIHEANADQMKSTNMEDVLADAYTSPQNKKAIRQVVKVVDDIQKAMGGVAPKFISIEFTRSEDRNPRRTISRQRQLENTLKDTAKSLVKSMNPNILSELDNASRSKKGLTDRLYLYFTQLGKDMYTGEPINIDEISNYDIDHILPQAFIKDDSLSNRVLVSKAVNNGKSANVPLKLFGAKMGHFWKQLAEAGLINKHKLKNLQTNPDTISKFAMHGFIRRQLVETSQVIKLVANILGDKYRNDDTKIIEITARMNHQMRDEFGFIKNREINDYHHAFDAYLTAFLGRYLYHRYIKLRPYFVYGDFKKFREDKVTMRNFNFLHDLTDDTQARIADTETGEVIWDRETSIKQLRDVYHYKFMLISQEVYTLRGAMFNQTIYPASQAGRKKLIPMKADKPVDVYGGYSGSTDAYMAIVRIHDKKGDKYKVVGVPMRALNRLNTAKNVSDAKYDQELKEVLTPQFTKSKKNRKTGEITQTVEDFEVVLGKVMYRQLVIDGDKKFMLGSSTYQYNAKQLVLSDESIKTLASEGKLNEAQESAAYDKVYDEILDKVNKYFALYDTNKFRQKLSLGKDKFVGLPNHNVFDGSKKISSGKREILNEILNGLHANATLGTLSDIGFSTPFGKMQQPRGIGLSSNTSIEYESFTGLFKRTIFLKDL

SEQ ID NO: 238 - protein, 1078 aa, Lactobacillus ozensis DSM 23829
MHKHYKYALGLDVGVGSVGYALLKLDEADQPCGLLKANSVTFPMSQDRTGNTLASIARNYRSGRRLNRRRKLRKQLVSNLFTKNGLINRNDVYSPYTKHPNFDLYRIWHDSFNQQISNQDLYRLLYYFAGHRAFKSNRIHQLKSSGDKDTTKLLSSIDTNKEYFNNSQYNHLGEMFYCDPKFAQRKHNKGYDDGYLFNIDRGTLLSEIKEILNAQSKFGNPAINDDFKARYLKILSQQRNFDVGPSNPSRFALVDSSGNIKLRNKKDKLNLSFKTSAKASYTFQKFQILQKLANTRYKLNSQSKYQSLNAETIDKIFNKAITKANYKYSQLKKDLKLPDSARFNMVMYETSDDKSAKQAETKTFIIKDNTYYILSKILSDKLQHDYTVIDQIAEILTRYTSDEPKAKALKRQLGEKLSDEKIESLLALNFTQYGSYSIDTMQCLIPYLAKGYDVTTAIDAFNEDQASLENGHSPLIDASMNYHEIISSIKNPALLQSFTKTVKVVKALIRRYGNPYTIHIEMARELSLGNKGKAELIKKQNENRKRNDKVITEMKENFPNVSINGENIIRLKLYHEQNGIDIYDGRMIDYQHVLDNNYEVDHILPYSISFNNSFNNKVLTSSRNNQLKRNRTPYEWLHNDKVRWDTFTSIAENVRNYPKKNNLLKMHYDESDMKKWKTRSLNDTRYATRLLYNYFKHNEQYFDAKPSVMTMNGSMTAQLRYYWGIVKQRAASDKHHAVDACVIATCSNSMVNLISKYHTAREKEQLSSKFPMPWPDFRNDVMNAKQQMNVKRIFSHSIAGKVNEDGLKGARYINTDKVVVIHEKLANLKLKKVGDDYIIVGHGNSRYLRPDDLTSISNRNSKNDLNSVIYDHIYNALSKDKKAFEKQPYLEFEHKGHKYTVRRVKVISDYKGGVILNRDADGNPISVANRGKMVRNDIFKCLDKKERVVYRFVPIYEHQILDTHLPNQYAPFAKNIFVNDKDQFICSLSKGDAVEVKLSTPKKVENCDEPYVCDHFIGYFDGSDISSNRIKINALDNSCSIRASMSKLISIQKCDVTIFGSIHKVHEKVRQPFNLKHK

SEQ ID NO: 239 - protein, 1362 aa, Lactobacillus paracasei subsp paracasei 8700:2; identical to SEQ ID NO: 205

SEQ ID NO: 240 - protein, 1362 aa, Lactobacillus paracasei subsp tolerans Lpl7
MTKLGKPYGIGVDIGSNSIGFAAVDENSHLIRLKGKTVIGARLFEEGKAAADRRASRTTRRRLSRNRWRLSFLRDFFESHITPTDPNFFMRQKYSEISPKDKSRYKYEKRLFNDRTDAEFYKYENCPTMYHLRNRLMTDPSKADVREIYFAIHHILKSRGHFLTPGDAKDFNTNKVAVNKIFPALQDAYAQVYPDLDITFDENKVNEFKTVLLNEKATPSDTQRALVNLLLAKEGDRDILKQQKQALTEFAKAVVGLKTKLNVALGTEVDSSEATAWNFSLGQLDDKWTGIESAMTDEGTEILDQIRDLYRARLLNGIVPAGKTLSQAKVDDYAQHHEDLELFKDYLKQLEDDGTAKAIRQLYDRYIDGDDAKPFVREDFVKALTKEVTAHPNAKSPELLERLAQPDFMLKQRNKANGAIPVQMQQRELDQIIKNQSVYYDWLAAPNPVEKHRKSMPYQLDELLNFRIPYYVGPLVTAKEQKAAQGGVFAWMVRKDPDGNITPYNFDEKVDREASANTFIQRMKTTDTYLIGEDVLPKQSLLYQSYEVLNELNNVRVNDNKLSFDQKQQVLGELFERHNTVTIKQFVDNLLAHGDYDRIPEVRGLADEKRFLSSLSTYNQLKGILHEAIDDSDKQTDIENIIAWSTIFEDKAIFKTKLNEISWLNAGMINSLANIRYRGWGQFSHKLLNELTLSTGRTVFEELLISSHNLMQILTDEVLKQKIAELNAHELKASGIYAAIDDAYTSPSNKKALRQVLSVIDDITNAAGQAPNWLYIETADGDGVPGKRTNSRQRKIQEIYANAAQELITGSVRGELEDKIASRADFTDRLVLYFMQGGRDIYTGKPLNIDNLSSYDIDHILPQSLIKDNSLDNRVLVHPLVNREKDTIFASTRFAKQMNGMWRQWHAAGLISSRKLRNLQMRPDEIDKYASGFVARQLVETRQIIKLTEQIVADQYPDTKIIAVKAGLSSQLRKELDFPKNREVNHYHHAFDAFLAARIGTYLLKRYPNLEPFFTYGKFKKTEVKKLKSFNFIRDMTHAKDKIVAKETGEIVWDNASDINELDRIYNFKRMLITHEVRFETASLFKQTLYAAKNSKNRGGSRQLIPKKKGYLVDIYGGYTQETGSYLSVVRLTKKAMYAVVKVSTRDAAKLAVAKSISEQKENETLKKIIDGKLSKTSKKGKTTHQLFEIVLPRVGQKTLFKNSKYNQFLVNSDTYMHNYQELWMPREYQRMWKDILLSNHGDAQLEGQLDQIFKFIVSQVNSYFNLYDINQFRKKIADATDKFAKLPTHDTDNARGKIATIGQLLIGLQANAMRSDLRNLDIKTPFGLLQIGTGITLDLDTSIIYQSPTGLFEREVPLTDL

SEQ ID NO: 241 - protein, 1368 aa, Lactobacillus paracollinoides DSM 15502
MDKKYSIGLDIGTSSIGFVGVDENGWPLNIKGKRAIGAHLFREGEAAAETRGFRTTRRRYNRRKWRLRLLREIFDEPISRVDPTFFARMKESSVSPKDPNYDGLAKEILIPRDKDGKILYPTIYHLRHALMYEDHQFDIREIYLAIHHIVKYRGHFLLDGAAKNFESSNLDLKSDIHEINAILVGIFGNEQVQFNDQYVEKLKEVLLDSTQSRSDRQKAAAKLLLPTNDLDKDTTKILKTVSTEITKAITGLKAKFFVITGNDIAKDQQKDWTFSIDTLDEKMSVIEPSFSEKNFSLITILQKLYSSVTLAGIVPNGLSLSEAMIQKYDRHASDLVLLKKYWDTKPKVLKHQLQNTYAEYIEIHQVVDEFYSDLSKLIKNDDDTLAQEIKSKITIGNFLPKQRTTENGVIPYQLQQRELDTIIKNQQEYYPWLAEENPVADHQIAFPYKLDELVGFRIPYYVGPMIAKEDTSNSKNSKFAWMIRKQSGEVTPWNFDEKIDRTASATAFIDRMTTTDTYLIGEDVLPKQSLIYQRFEVLNELNKISIDGQPITRKQKQSVYTHVFEKKKTVQVKDVQKFLVSSGEVMSLPKIGGLANEKQFNSSLSTLYDYNKIIPDALEDRNKVDDIEKIILWSTIFEDNSIFVEKLDSIDWLTSSQRKRLAQKRYRGWGRLSLRLLTTFKNKDGYSILDELWNSNHNFMEIQAQSDFSEQIATANNNNLSQVLPAKWEPGRKNLASLDEFISNLYTSPQNKKALRKAIRVVQDMMTAAGHMPEKIFIEVARDTSNSHQQTIARQRQLQQLYQSEDKEVIDSSVRSELDDILKNRANIKDQLFLYFQQGGRDLYTGKAINIDKLSLYHIDHILPQSLVKDDSLDNRVLVSQKTNEDKGVTFVSDKYMNNMLPTWKRWHEMGLISARKLKNLTMRPDEIDKYAPGFIQRQLVETRQVTKLVIELLDALLGNSQTEIITIKASLSHQFRQQFDLVKIREVNDNHHAFDAFLAARIGTYLYKRYPKLRPYFVYGQYMQNHKNLKSINLIKTLDSDKAIVDEGTGEILWDKKSDLAKMIKIYNYQRLLITHESRTSFGAMYKQKILKATDAKQNGGGFKLVPTKRNRPVDIYGGYTGQTAAYLTIVRVYSKKTSELRVLPIYTNKVQQIEKAMTQGDKATMLAFKKVIAPQLGKENKKTHEIKIPEFDVVIPKVLLDQLVIDDIAGSPHRFRLGTDTYYHNSQQLFLPLSMQRQLMDRESDDKVYLDIFNDVLKQVDSYFNLYDVNGFRAALQKSKKAFEQLPINDFPKDVPDNKKKKGKRSILKEIFIGLHANATLGNLKQMGIKTDFGKLQKSNGLRITENCKIIHQSPTGLFERIVPIK

SEQ ID NO: 242 - protein, 1386 aa, Lactobacillus parakefiri DSM 10551
MCLKEFTGQHYFEEFYRMKVNNYHIGLDIGTSSIGWVAMGEDGKPLRVKGKTAIGARLFREGNPAADRRMFRTTRRRLNRRKWRLKLLDEIFDPYITPVDSTFFARLKQSNWSPKDSRKAFKDSTLFPDLTDKQYHLDYPTIYHLRHALMTQDKQFDIRMVYLALHHIVKYRGNFLNSTPVDSFKASKVNFDDQFKKLNELYTAINPEESFQINFANSEKIGQQFLDPSIRKFDKKKQISKIVPVTMDDKAVDKLNGKIASEIVNAILGYKSKLDVAVQCDPEDSKPWAVKFDDEDIDAKLQKILPEMDENQQSIIGIIQDLYSQVTLNQIVPNGMSLSESMIKKYNDHHDHLKLYKKLIGQISDSKKKTALKKAYDQYVGNDGKVIEQDDFYSSVKKNLDDSELSKQIMDLIDADKFMPKQRTSQNGVIPHQLHQRELDEIIEHQSKYYPWLAESNPNKHDLHLAKYKIEELVAFRIPYYVGPMITPEDQKKSGAAVFSWMKRKEPGQITPWNFDQKVDRMESANKFIKRMTTKDTYLIGEDVLPDESLLYEKFKVLNELNMVRVNGDSLKVADKQAIYQDLFENYKHISVKKMQNYIKDKTGLPNNPDISGLSDPDHFNNSLGTYNDFKKLFGDKVDDPDLQDDFEKIVEWSTVFEDKKILRAKLNEISWLSDKQKDDLESSRYQRWGRLSKKLLTGIVNDQGERIIDELWNTNKNFMQIQSDDDFAKRIHEANADQMKATDVEDVLADAYTSPQNKKAIRQVVKVVDDIQRAMGGVAPKFISIEFTRSEDRNPRRTISRERQLEDTLKDTAKTLVKSMNPDILSELDNASKSKKGLTDRLYLYFTQLGRDMYTGKPINIDEISNYDIDHILPQAFIKDDSLSNRVLVSKAVNNGKSANVPLKLFGVKMAHFWKQLAEAGLINKRKLKNLQTNPDTISKFAMHGFIRRQLVETSQVIKLVANILGDKYRNDDTKIIEITARMNHQMRDEFAFIKNREINDYHHAFDAYLTAFLGRYLYHRYIKLRPYFVYGDFKKFREDKVTMRNFNFLHDLTDDTQARIADTETGEVIWDRETSIKQLRDVYHYKFMLISQEVYTLRGAMFNQTIYPADEAGRKKLIPTKADKAVDVYGGYSGSNDAYMAIVRIHDKKGDKYKVVGVPMRALDRLNAAKNVSDAKYDQVLKDVLTPQFTKSKKSRKTGEISQTVEDFEVVLGKVMYRQLVIDGDKKFMLGSSTYQYNAKQLVLSDESVKTLASKGKLDEAQESAAYDNVYDEILDKVDRYFALYDQRNYRTNLHEGEQKFIGLPLHDTFDGSKKVANGKRETISDILNGLHANATMTNLKVLGISSPFGMFQSHGPINLNPETIILCQSPTGLFERRIILRDL

SEQ ID NO: 243 - protein, 1382 aa, Lactobacillus pentosus IG1
MKKIVNYNLGLDIGTSSIGYAAIDDQGRPVRHQNKTVMGVRLFKEGKTAESTRIFRGTRRRLSHRHWRLGYLDRIFDNEIAKVDENFLPRLKASKRARSDEKRSFRGSLLFPETGDDAYYQKYPTIYHLRYALITQKKQFDIRLIYLALHHMIKYRGNFLDTTPVSAFNIHDIDLTDQFASLNDCYQLLDMDFEFQFDLNNIEQVQKLLLDETLSKTKRQAAVSKVLVMSTGNKAFDDQQNGIASEFIKALLGGPFDLSKILNLSVADVKSWKLHMTDKDVDDTLNSLVEELDENHKQIVNLLQMIYSQVMMLGLLNGQQSISASMIERYDDHAKHWAALKKLLPALGEQEQSTIIHAYTAYTGHSRTKQLSRAEFYTKVNSILKKHENIAEATGLIELIDRNEFMPKQRDAVNGVIPHQLHQRELQLIIQNQQKYYPFLAAKAYPDADETMIEQLLSFRVPYYAGPLVDRDFINESSDQEQAMQNTKFSWLKRREAGEITPWNFEQKVDVQETANRFIKRLTTKDTYLMTEDVLPKESLIYQRFEVLNELNAIRINDRRLTAENKQLAFQQLFMAGNTKNVSIKKFRNFVFDSLKFPEKVKITGFAGQHNFLAKLSTYHDFKKIFGERVDHTDLQPDFERIVEWCTIFEDRHIYREKLKEIQWLSQSEIDQLVLIRNHGWGRLSKRLLTGIRDSDGRTVMDQLWFGTDNFMRIISQSDFAAAIANENRTQLNQHGLEDVLDSAFMSPQNKKAIRQVLKVVDDIEQTLGCPPKKVMIEFTRSPDKKKQRTVTRLEKVQQAYKAVADQLAGQSIVSELDQYANTHSKLSDTYYLYFMQLGRDLYSGKPIDIDSPMLDDDHILPRAFMKDNSLDNRALTEKPINNTKAAKFPSKVFGQQKEVTDFWKLLRRCGLMSNIKEKHLYLDPDNVDKWTRRGFIHRQLVETSQVIKIVANILNDRYQQSQTEVLEVPARLGTELRECFGWYKVREVNDYHHVFDAYLAAFIGNYLYRRYPKLQPYFVYGNFAELNKAQLKNIKSFNFLYNITDNKRVVKDIETGQTLWDDQIRQQIQHIYEYKYMLTSHEAFTQHKELYGQTIYPRREFKPGTLKAIKQDQPQELYGGYKNLTAAYMCIVKIQARKRRAAEYRVVRVATESLSALQQAKRLGVQAYERCLRQELVRNNEILRTNADPNSAPREFEVLLDRVLCHQMIISDGQKYLLGSHAYKINCMQLVLSNNSMKILSTSIVKLKQMTNEPLVQVYREILDVVNKYFTLYDVNSFRENLNQFFDKFRTLPITNEYESSKSGKKLIHRGQLETLTLILRGLHANSDKVQYGDQSTLLGGFQTKDGIKLSKDSVIQYTSPAGLNVRTVKLRDLEQKEAQK

SEQ ID NO: 244 - protein, 1361 aa, Lactobacillus pentosus KCA1
MNEPYGVGLDIGTNSVGWTVVDMNGRVRKVKGKTALGARLFKEGATAEDRRGFRTTRRRLKRVKWRLRLLREFFDQPISKIDPNFFARRKYSDISPRDPNYNGLAKTLFNDRTDKEFYDDYATIYHLRDKLMTSNRKFDIREIYLAIHHIVKYRGNFLRTGPASQYGSASLHLATSFQKLNDLFAQSEETLNLKLVTDEALLQQIQQILVRTDLSRSEQQRQIWPLMAVLTGASAAEKKRQKNVVVELSKALVGLKAKMNVVTLTEVDAAVVKDWTFTMEESQDKLPEIEEQLSEVGQQIMDEVIQLYASVNLAQLIPAGKRFSQHMVEKYKHHEKNLELLKAYIHSQSDSKRGREIRATYDRYIDGVDSKPVTQEMFYKDLMKYVEADATSNHLAAEIKDEIDSEQFMPKLRTKQNGSIPYQVQQYELDQIISHQKKYYPWLGEENPVAERRGKFPYKLDELVGFRVPYYVGPLITKEDQQATSGAGFAWMVRKADGPITPWNFDQKVDRIASATAFIQRMQTTDTYLIGEDVLPARSLIYQRFMVLNELNNMRVEDRKLAPQQKQRLYNQVFKQHQHVSVKNIQQNLMDAGEYRKTPQITGLADPKGFNSSLSTYHDFKKILLEAIADEHKRADIEKIILWSTTFEDSAIFKQKLEEVAWLTDAQRKQLSGLRYRGWGQLSHKLLTAFKDDKGRSIMDGLWETSDNFMQLRKQPAIETQIKEANQANLTDADIQDTINELYTSPQNKKAIREVMLVLDDIKNAMHGQTPSWIFVEAARGGGVAGRRTQSRSSQIVEAYKGTAKEIVSEKVQHELNEKIKAKADFNTRLVLYFLQNGRDLYTNEAINIDRLSEYDIDHILPQSLVKDDSLDNRVLTSARINREKNDTFASEKFGRKMGAQWRELHRNGLMTQRKLKHLLMRPDEISKHATDFINRQLVETRQVIKLVEELISSEYPAASIVAVKANLTHQFRQTFNFPKLREVNDYHHAFDASLTAFIGMYLLKQYPKLERFFVYGKFAKQPINLTRFNIIRKLAVAEKPIANIETGEILWDKTADIKYFEKLYNYKRLLVTHEVRENYGAMFKQTLFKASYNKSKTLVPKKNHMETSVYGGYSNQETAYLAIVRIPFKSGFKFIVVGIPTRMVAKIKHYQSLGATLNQATHKVIEPKFTKISRKTKQTVISDYEVVLPKVYLDQVVRDQVKGQMYRFSLGSDKEYHNVQELYLPLSIQQAFVGHYDESDDQRSNDLVKVYDAALKQLQRYFPLHLSRNFDQVASQAHQSFEGLKNNVQTSDKQLGKKEVLNSLFVGLHANATRSNLSVLGMSKDFGRIKSNGITLTDQAEIIYQSPTGLFERKVALKDL

SEQ ID NO: 245 - protein, 1358 aa, Lactobacillus plantarum EGD-AQ4
MKEPYGVGLDIGTNSVGWTVVDASGHVRKIKGQTGIGVRLFKEGAAAADRRGFRTTRRRLKRVKWRLRLLREFFDQPISKVDINFFARRKYSDVSPRDPNYNGLEKTLFNDRSDQDFYHDYPTIYHLREALMTQHRKFDVREIYLAIHHIVKYRGNFLRNDAATAYRSGTLDLQQHFETLNHLFSQADLELNLNLTTDVALLDSIKQTLVRTDISRSDRQKLIMPLLAVLTGATTAEKKRQKAVVTEFAKALVGNKTKIDVLTLTDIDATEAKDWAFSLEENQDKLPGIEDRFSEVGQQIIDEVIRLYASVNLAQLIPEGKRFSQSMVEKYKRHGEDLKLLKAYIRSQSDAKRGRAIRATYDQYIDGVKSKQVTQEAFQKALGKFVDADVDLNSWAAQIKQAIDSEQFMPKLRTKQNGAIPYQVQQNELDQIISNQKEYYPWLGEENPVIKRRGKFPYKLDELFGFRVPYYVGPLITKEMQAATANAGFAWMVRKADGPITPWNFDDKVDRVASATAFIQRMQTTDTYLIGEEVLPARSLIYQRFMVLNELNNIRVDDGQLTPRQKQRLYNQVFKKHKRVTAKNIQDNLVAAREFPTAPRITGLADPKVFNSSLSTYHDLKQVLPEAMSDVRKQADIEKIILWSTIFEDSTIFKQKLTEISWLTAAQLKQLGQLRYRGWGQLLRKLLTGLKDDNNRSIMDGLWETNANFMQLRSQPAIENQIKSANQANLTTADLQDTINELYTSPQNKKAIREVMVVLADIKDAMHGQTPNWIFVEAARGGGVAGRRTQSRSKQIVAAYQGTAQAIVRDQVQRELKEKIKNKANFNTRLVLYFLQNGRDLYTGDAINIDRLSEYDIDHILPQSLVKDDSLDNRVLTNARINREKNDTFASEKFGKKMGAKWKEMHRMGLMTKRKLDHLLMRPDEISKYATGFINRQLVETRQVIKLVEELINAEYPSTAIVSVKANLTHQFRQTFDFPKIREVNDYHHAFDAALTAFIGTYLLKRYPKLERFFVYGKFAKQPVNLTRFNVIRKLAKTDTPITDIDTGEVLWDKLTDIKYFETLYDYKRLLVTREVSENYGAMFDQTLLKASDNGKRLIRKKQSFDTAIYGGYTGKTLAYMAIVKVSTKKDVQYQVVGVPTTMVTQIEQLEQQGMTNKQAVTKVIEPLIAANNKKMLTYEVLLPKVRFEQVVRDRIKGQTHRFALGTDTYYHNIQELYLPLTLQRAFLGKQNESEVQLNQNLLTVFDATLAQVNRYFPLYEMNKFKKILNSARDQIELLEAKNQFVKNKLVLGKQGILTNMFIGLHANASYGDLKVLGVKIDFGKLQVPGGIKLTGDAEIIYQSPTGLFERKIALKDL

SEQ ID NO: 246 - protein, 1390 aa, Lactobacillus psittaci DSM 15354
MKEVKDYIIGLDIGTNSCGYVVTDKQNNILKLKGKTAIGARLFKEGEAAADRRAFRTTRRRLARRRWRLGLLEEIFDEEMAKVDSSFFRRLKESDYSPKDSRKQFNSIVFESSEADKDFYDKYPTIYHLRNALMHDDQKHDLREIFLAVHHIVKYRGNFLREDSVKAFKAAKFTLQGEDGIGPVDKLNDLLKEIYIEAAPELATDNLSKIEEIIKDKKLYKQDKLKQVATLLTKEADTKDKAKLNKDVAKQVANAFMGYMIIFDTIFNLSDVDSKDYKVKFSDANIDEKLDTLTSLLTDKQTEFVLELQNIYNTIVLNEIVPDGKSLSESMVKKYDDHKEDLKLFKAYLNSLTDVKKVKELKAAYVLYVNNRKANLLAAKKLLGKKADNMNNFEIFSKFVADNLDDSELANKIRARLDLGEFLPKQRTNQNGVIPYQLHQVELTQILEKQGKYYPFLIAPNPVESHRNNAPYRISELVSFRVPYYVGPLIDPNNAESEQDKANSSFAWMVRQKQGQITPWNFEEMVDTTESANKFIKRMTTKDTYLLGEDVLPASSLIYQKFVILNELNNIKVNGIKLTSEEKHQIFDELFKVQKSVSLKNLVNFLTAHGCVAPNVTGLSDGTKFNSSYSTYIDYRKIFGAEIDNKDKQADFEKMIEWSTVFEDRKIFKRKLEEITWLTPDQIKQVSSKRYSGWGRLSKKLLTQITDENGVNILQRLWNESENLMQILSDPVIKEKIVAANSSFTKATDMEDILAEAYTSPQNKKAIRQVMRVVDDIIAAAHGKKPSQIAIEFAREDQDNPQMTKSRKAQLDQIYAKISDEFLDNAVKNELKNMKDNKPLAKDKVFLYFKQMGRDAYTGEKLSLDNLQDYDIDHIYPQSFIKDDSFDNRVLVQRAVNNGKSDNVPVLLFGNKQAADLGMTIRQMWKKWLELGLISKRKFNNLITDPEKISSYMASGFVNRQLVETSQVIKLVANILQAKLPDTEIIEVKASYNSILRKEFNLYKSREVNDYHHAIDAYLTTIVGNYLYQVYPKLRPYFVYGQFKKFGKAESKEDDPVKKIKQFNFIYQLLWGKDDAICISHTDQQVFSRSDIINKLTTAYNFKYMNVSQEVYTNSNNVFKQTVFPIIERDTAKSRSLIPKKLDRPTDIYGGYSNNNDAYLALVKVDKKKGSEYRVVGIPMRAAAMLKASKNYDEDLRKVIEPMVMLDKNGKAKRGIEGFRVLVGKMPFKQAVLDGDKKFMLTGTNDMPNLKQLVLSQQNMKYILDYIDDIDCRKHKFGNKTQDGNKCLLEVFDEIIQIVDKHFELFDNRSFREKLRNSRVNFINLALSKKAEALLAILNGLHANSMRTTIKELKISDLGRIQSSVISPEAQLIYQSPTGLFERRVKVKDL

SEQ ID NO: 247 - protein, 1369 aa, Lactobacillus rennini DSM 20253
MDKPYNIGLDIGSHSIGWTVVDDNSKLVRIKGKLGYGVRLFDEGKTAEERRQFRTTRRRLKRRKWRLRLLREIFEPHIAPLDETFFLRQKQSNLVPTQKKLPQLSLFNDRSDAEFYHKYPTIYHLRNALMTEKRQFDLREIYLAIHHIVKYRGHFLNAAPAASFKSGKFDLENKFDQLNLLFASAYSDLDFTLRTDNVDQVKAILLNEDLSASTRQRQALPLIYQTSADQKAAKKLTKSLATELLKAILGLKAKFDVLTGIETDDTKAWRLTFNAEDFDDKLNELNVTDNEAATQIIEILRELYSSILLAAIVPENYTLSQAMMAKYNAHKQHLSLLRQVKTTLPAKKQKELQAAYDDYIDQHLPLDKFYAKLTKVLPKEKDTDNPQIIQILNLIDLDQFLPKQRTKDNGAIPHQLHQQELDQIIDNQKAYYPWLAQLNPNEKRQKIAKYKLDELVAFRVPYYVGPLIEAKTQQKTSGANFAWMIRKEPGTTTPITPWNFDEKVNRQASANEFIKRMTTTDTYLLGEDVLPKHSLLYQRFEVLNELNGIKIDQKRVTVRQKQAIFNDLFLKQPNVTVKKLQQYLQAKGEYASAPIITGLSDPKKFNSQLSTYHEYKKIFGGLIDDPDKQADFEKCIEWSTIFEDSQILKDKLKEINWLTPEQRHKVANKRYQGWGRLSKKLLTQLVDYNGQRIIDILWNTTDNFMQIVHSEAFDKAIIKENQALLTQYNPQAVIDDLYTSPQNKKALRQILLVVNDIQKALKGQAPSRILIEFAREGQENPRLSTQRKQQVENAYKEASDALLSSAEVRQELKGLDNKALANTRLFLYFMQGGRDIYTGKSLNIDDLSKYDIDHILPQAFIKDNSLDNRVLVSAKMNRSKSDQVPLNDFAEIRYGKQMRQQWEKMLRAGLITRKKYHNLTLNPESINKYTAKGFINRQLVETRQVTKLATNLLVDQYAEDDVQLITVKSNLTHQMREEFDFPKNRNVNNHHHAFDAYLTAFVGLYLLKRYPKLAPYFVYGDYQKGASQNSKWRNFNFLGNLHREKVVDKNTGEIIWQRDAGLGELNRIYNFKKILVTRALRVNRGPMFKQTIYKAEEDKSSGRGSKQLIPTKKNRPTELYGGYTNKETAYLCLVKEPHKKGDIYRICSVLNMWLTELDRIADPIAKAQKLTELLTPQFTTTKKKQGQKIPVVKPFKVVIPKILINQRFFSRGQELTVASPMYMHNEQELFLNKKTIKLLNGQLAKNEAHELAPKIYQQILDQVNDYFPLYDMYKFRDTLNASKEIFVNLPWQDQRQDKKISQSGQKSILNKILIGLHANAARIKLTELNFKSDFGLLSQRSGIAFSPDDQIIYQSPTGLFERRVTLKDL

SEQ ID NO: 248 - protein, 1368 aa, Lactobacillus reuteri Mlc3
MIKKDYNIGLDIGATSVGFAGIDEQYDPIKLKGKTVVGVNLFEEGQTAADRRSFRTTRRRLNRRKWRLSLLEEFFDPYITPVDPAFFARLKESNLSPKDNNKNFSRSLLFPDITDQKFYEEYPTIYHLRYALMTENKKFDLRAIFLAIHHMIKYRGNFLNSTPVAHFDTSKIDFANDFSKLNRLYLNEDPNNIFEINLQNVKEISDILLDHSIKKFDKQKQVAKLLLTSQNDKELDKRNKQIATQISKAILGYNFSLNEILKLEAVNKSKWKLNFSSADIDDTLPDLISELDESQESILNIILSLYSRLTLNGIVPSGMSLSESMIDKYGTHKEHLDLLKKYLKTLPIKNRKEIAEAYAEYVGNSLKKSGHISQEEFYKAVKKNLDKSETAQKILSLISEEKFMPKQRTNQNGVIPYQLHQKELDQIIVNQSQYYPWLAELNPVTEHKDAKYKLDELIAFRVPYYVGPLIDPKTIPQTEQGNKNASFAWMVRKENGQITPWNFDKKVDRISSANNFIKRMTTKDTYLIGEDVLPAHSLIYERFKVLNELNMIRVNGKKLSVSVKQNLYNDLFKQQKTINRKKLANYLQANLGIPERPQITGLSDPEKFNSQLSSYIDLQKILGSEIVDDPNKQDDLEKIIEWSTVFEDSRIYKVKLQEIGWFTEKQKNELVSHRYQGWGRLSKKLLVELKDKNGRSIIDLLWNSQRTFMEIQSRPEFAEQITNENQDKLTEDNYEDVLADAYTSPQNKKAIRQVIKVVDDIVKATGKAPKFISLEFARSDERSDRVKSRKTHIQKIYETTAKELLKDDQLIKELGSVSDLSDRLYLYFTQLGRDMYTGKPINIDEISTMYDIDHILPQAFLKDDSLDNRVLVRRQDNNAKSDTVPALKFGKMKPFWNKLQKHGLISKRKLNNLQTNPESIDKFKAVGFVNRQLVETRQVIKLAANILASRYPDSKIIEVKASLTHQMRESFNLIKNRDVNDYHHAVDAYLSAFVGQYLYNRYPKLQPYFVYGQFKKFDKQSTRIGMKTNHFNFLYDLEPEGKNVKIKKPTKIINKETGEIIGDRDELVAKLNRVYNFKYMLVSQEVYTRSGALFDQTIYPANSGKKLIPLKQNKTTAIYGGYSGSKAAYMSIIRLRDKKGGTYRIVGIPVRAVNKLNQAKKKSNEKYLAELKAVIEPQIAKTKKDRKTGQRVLVPQEFDVIIPEVMYRQLIVDGDQKFTLGGTIDRYNAVQLVLNQEILTFLEQPTKYKDADTKLLDIYDQIVNLVEKYFMLFDSKRLAAGRVAFEKLPTLQPVDKMPSKLIIIRRIIQGLHDNAARTDLKAINGSSSFGRLQKRNGIILSPNACLIYQSPTGLFERKVYLNTISPLK

SEQ ID NO: 249 - protein, 1361 aa, Lactobacillus rhamnosus GG
MTKLNQPYGIGLDIGSNSIGFAVVDANSHLLRLKGETAIGARLFREGQSAAERRESRTTRRRLSRTRWRLSFLRDFFAPHITKIDPDFFLRQKYSEISPKDKDRFKYEKRLFNDRTDAEFYEDYPSMYHLRLHLMTHTHKADPREIFLAIHHILKSRGHFLTPGAAKDFNTDKVDLEDIFPALTEAYAQVYPDLELTFDLAKADDFKAKLLDEQATPSDTQKALVNLLLSSDGEKEIVKKRKQVLTEFAKAITGLKTKFNLALGTEVDEADASNWQFSMGQLDDKWSNIETSMTDQGTEIFEQIQELYRARLLNGIVPAGMSLSQAKVADYGQHKEDLELFKTYLKKLNDHELAKTIRGLYDRYINGDDAKPFLREDFVKALTKEVTAHPNEVSEQLLNRMGQANFMLKQRTKANGAIPVQLQQRELDQIIANQSKYYDWLAKPNPVEKHRASKPYQLDELLTFRIPYYVGPLITPKEQAESRENVFAWMIRKDPSGNITPYNFDEKVDCPASANMFIQRMKNTDTYLIGEDVLPKRSLLYQKYEVLNELNNVSIDGRRLGADQKQRLIREVFERHSSVTIKQVAENLVAHGDFAKRPEIRGLADEKRFLSSLSTYHQLKKILHEAIDDPTKEHDIENIITWSTVFEDAAIFKTELAKISWLDSDTIKALSNIRYRGWGQFSRKLLDGLKLGNGHTVIQELMLSNHNLMQILTDETLKTTMAELNQDKLKADDIEDVINDAYTSPSNKKALRQVLRVVEDIKHAANGQDPSWLYIETADGPGTAGKRTQSRQKQIQTVYANAAQELIDSAVRGELEDKIADKASFTDRLVLYFMQGGRDIYTGAPLNIDQLSHYDIDHILPQSLIKDDSLDNRVLVNATINREKNNVFASTLFASKMAATWRKWHEAGLISGRKLRNLMLRPDEIDKFAHGFVARQLVETRQIIKLTEQIAAAQYPNTKIIAVKAGLSHQLREELDFPKNRDVNHYHHAFDAFLAARIGTYLLKRYPKLAPFFTYGEFAKVDVKKFREFNFIGALTHAKKNIVAKDTGEIVWDKERDIQELDRIYNFKRMLITHEVYFETADLFKQTIYAAKDSKERGGSKQLIPKKQGYPTQVYGGYTRENTAYLAVVKTVEKKADVYRVVRIATSQVAALKEARAQSTVKERELLKKFLTTKFTKIGKNGKKAITPFDIVIPRVPREQLFHNKRYGFFMVNSDTLMHNYQELWMSRSDQQILSKLVKSAKTVENGQVGRLFENIVEQINKYFPLYDINQFRKKLDQSKDIFSKLPLEGNGTTSGKRETIQNILTGAGTGAKNGDLKNLGIKTPFGFLQVPSGIVLDDDTTLIYQSPTGMLNRIVRLSEL

SEQ ID NO: 250 - protein, 1361 aa, Lactobacillus rhamnosus GG; identical to SEQ ID NO: 249

SEQ ID NO: 251 - protein, 1378 aa, Lactobacillus rossiae DSM 15814
MKTFAEEYVMDKSKPYGIGLDIGTNSVGFVATDAEGHLIRLKGKTVIGAYLFNAGISAAERRGFRTTRRRLSRVKWRLGLLREIFETHFQESMGENEDNDFFLRFKYSNISPKDPQFSTAKGLFNDRTDKEFYDQYPTIYHLRRALMTEDHQFDIREIYIAMHHIVKYRGHFLKEGRAKDFKVGDLRLLDNFKMMNEQIEEINPLWQLKLPTDDASIKSITAILLDNTQSQNDRQKAVTKVILATLVKASDKDINAARKRFVGELSKAMVGLKTKLWVLADVSQNGDWEIKYENYADFAETIGSGESDTIQSLFNEINDLYGVITLAGIIPKEAESFSDGMVRKYEHHRKNLELLKVYCAEQSDGKRGRQIRQTYDKYIDGVDSKQFTQEDFYKALSKFTAKDEATSENAKLIAQEIAVGTFMPKLRTKANGTIPHQLHQKELDAIIENQKKYYPWLGEVNPVESHRRALPYKLDELVSFRIPYYVGPMVTPTKGDPEKSKFAWMVRKEPGTITPWNFDQKVDRSASGEAFIQRMKTTDTFLIGEDVLPQQSLLYQKFEVLNELNKIMINGKPICREQKQRLFKQLFMQYKTVTVKKVQQNLIANGEESENVPITGLSDPLRFNSSFSTYIDYKDILGTAAVNDNAKQSDIEQIIAWSTIFEDAAIFREKLNDITWLNDDQRNKLSHKRYRGWGRHSRKLLAGLRDGEGQTIIERLWNTNDNFMQIQNDSEIARQITEANSSKMATAEGTDEIIDGFYTSPENKKALREVMKVVKDIQRAHHGQAPAWVYIESPRETPRPGQRTVSREQQLTDLYEGAAKEIVDDAVLNELKDKVKSKENFTDKLVLYFLQNGHDIYANDSINIDNLNAYDIDHVLPQSLIKDDSLDNRVLTTHERNLKKSNRFATELFADQRKKWEKWHRLGLISSRKLKHLTMQPNSVEKFAHGFIARQLTETRQIIHLTANVLSNLYQENDTKIVMIKAGLNSEFRRTFDFPKNRSVNDYHHAFDAFLTAKIGRYLLARYPKLEPFFVYGNFVKNPKAMKRLSSFDFIAQLAAKTDDTSHIDQRSLKQVPVVNEETGEIVWDKDIELAELDKTYNYKTMLVKRAQTENNAQMFKQTVFKARDNQNKTLIPVKNGLSTDVYGGHSQQAISYLCIVWVGQKKKYRVLGISTAHAGILNNFEKNYGRFEAKKKLQEIVSNTLDNADRNDFKIVAPKVLFEQVVEDDNMKFGLGSASDYRNVQQLFLSRKNQLLLANMMTDQIHDQDLVHLFDEIVGQMNAHFPIFDRGGYRSSLTQSRDKFLKLPFKKNEDLITKQEVIRRILDGLHANANRKDLKIIGSKGDFGRLGTKKIYLSKDAKLIYTSPTCLFTRTVPLSSL

SEQ ID NO: 252 - protein, 1375 aa, Lactobacillus ruminis ATCC 25644
MRKNQEPYNIGLDIGTSSIGWSIMNDNFDLMRVKGKKGIGVRLYNEGQSAAERRMHRTARRRYGRRKWRLRLLEDFFDEHMAEVDDTFFARLKDSNISPKDDKKYRKSLLFPKSKGVTYQDDGEFYKKYPTMYHLRYALMTEHRKFDLREIYLAFHHMVKYRGNFLYDTSVDSFEAKNLDIKGKFDEINDLLSSYTDFYVDNSNAALVESILLEKNTTRKDKSKKIAKLLHVEDKEKGKNKKAKDLATQISNAVLGLKCNFHLIFELQQKYSFDLCSEKTEENIAKLSEVLDENQKMLLMILKEVQDQVMLNAFVPSGMSLSEAMMQKYDDYGEQLKIYHELEHSVSDDSAAKLRGAYRDYNDNIIKRIDGDNKKDTFYKRVKNILTKISKEYVDQDVLESCGKLKKLIDENKLFIRQRTAANGVLPHQLHQIEMRKIIDNQKEYYPWLAEPNPNEKRRVYSKYKVEELIAFRIPYYVGPLVDPNNADKNKEARFSWMVRKKDGEITPWNFYDKVDWAESANNFIERMKSKDTYLLGEDVVPKESMLYQKYEVLNELNNLRINDSGLSDSFEDVKLKQAIYNDLFKKQKIVKITDLQNYLVQNHKYLVKPKISGLADENRFLSSLSTYSDLKTIFGDKVDDRTYFNDFEKMVEYSTVFEDGHDYNQKLDEYTWLTKEEKYKIGKKRYRGWGKLSKKLLTGLRDKNNHTIMDNLWETNRNFMQIQTADEFSKQIAEENERHLKGSVSDAINDMYTSPANKKAIRQVLRVVDDIQKAMGYAPSSISLEFAREDGPSVRTVSRANRMKSIYEKYASEVSEEVMKDLDGVIKDKKGLNDRLYLYFEQQGKDMYSGHPLDFDKVISGQEYDIDHILPQAVIKDDSLDNRVLTTKALNNDVKSKGVPCRMFNGMHSFWKNLYDKGFISRRKFNNLTTNPENIDKYKMKGFVNRQLVETRQIIKLVANVLNDKYQNDDVDIIEVRAELTHDVRKHFKFYKNRNVNDYHHAFDAYLTSFIGHYLFKKYPNLRPLFDYNDFMKVSDNVFKQLRGNNFLGEFLNKTGDIISTDGNFVLNKEEMINKLNKAYAFKKILVTKEVGQRTGAMFNETRYPAPNSRKAALKYRRMPKPDSLISVKDYKNTDIYGGYSGKNDAYMVIVDMGKQYMVVGVPVRYTEKLDKLRIKHSELYRDELRKVLSRDKTLLDSKGNVKRFDIVLDRVLYGQLIEDGNELFTLGSSKYKRNFRQLFLDKQCIEILDSSATPQPTDEELIWVYDQILDKVDKYFELYDINRQRETLRKGRAAFCSLPNISMKKDDVTKKKILNEILVALHANESESNCEKIGKKVFGRLQVPGGIKLSKEAKLIYQSPTGLFERVVYLKDL

SEQ ID NO: 253 - protein, 1369 aa, Lactobacillus sakei carnosus DSM 15831
MAKTYNIGLDIGTNSIGWAVVDDQNHLMSIKGKYGYGVRLYDEGKTAEERRSFRTTRRRLKRRKWRLSLLREIFEPQITPLDNTFFLRQKQSSLSSKDNRKLYPEMSLFNDRTDTDFYTQYPTIYHLSRDLMTKNKQFDIREIYLAMYHIVKYRGHFLNESPVSSFKSSEIKLAENFETLNQIFNERFNESMFQLAVNDFDDLKALLLNDQQSASNRQKKALGMIYVPNENKSLEKQNKAIATELLKAILGLKAKFNVLTGIEVDDAKPWTLSFNSESFDEDIDKAATNIDDDSREIIAILQGLYSGILLAGIIPENQSLSEAMVEKYDQHAAHLKQLKSIYPLLSISDKKAIQQAYNYYIDGQDNAKAYSREDFYAATTKALKSYQDNETIAEILKLIELEQFMPKQRTKDNGAIPHQLHQQELERIIENQQKYYPWLAELNPNESRRKIAKYKLDELVAFRVPYYVGPLITSEQQQQSSNKKFAWMIRKAEGKITPWNFDEKVDRQASANEFIKRMTTTDTYLLAEDVLPKQSLVYQRFEVLNELNGIKIDDVPITVEQKQRIFNDLFMMQASVSVKNIQDYLVSKGYFASRPEITGLSDENKVISRLSTYHDLKAILGGIVDEANKQADLEKCVEWSTIFEDGKIFVEKLNEIEWLTDEQRKRLSSKRYRGWGRLSNKLLNQIVNENGQRIMDLLWDTTDNFMRIVHSEEFDKLISAANQTLLSKNDVQDVINDLYTSPQNKKALRQILLVVSDIQKAMKNQAPSKILIEFAREDEANPRLSVQRKRQVEQVYQNISKDILSDSDVKAELKDLTNTALANTRLFLYFMQGGHDMYTGETLNIDRLSEYDIDHILPQAFIKDNSLDNRVLVSAKMNRSKSDQVPLNDYTEERFGSKMRVQWEQMLRAGLITKRKYDNLTLNPDRISKYAMKGFINRQLVETRQVIKLVTNLLMDHYEDDEVQLITVKSGLIHQMREMFDFPKNRNLNNHHHAFDAYLTAFVGIYLLKRYPKLTPFFVYGSYQKNNTNDKWRNFNFLNDLKKEEVIDSDSHEVIWNKAQGLVELDKIYQFKKILVTREVHENTGALYNQTLYSAKDDKASGQGGKQLIPAKQDRPTALYGGYSGKTVAYMCIVRIKSKKEDTYKVCGVKTSWVAELERLSDSNEQLASLKAKLMPKFTKNKKQKGKTIQVTEDFEIIVPRVLINQRFYDNGQEITLGSATYKHNEQELMLNKKAVKLLNGQLSLVEAETLAPQVYDEILKQVMKYFPLYDTNQFRTKLKMGKEQFIKLPWKNKWDGNKLIHVGQQTVLDRILIGLHANAAVSDLSTLKVTTPFGKLQQPSGIALSLNTKIIYQSPTGLFERRVALRGL

SEQ ID NO: 254 - protein, 1149 aa, Lactobacillus salivarius UCC 118
MERYHIGLDIGTSSIGWAVIGDDFKIKRKKGKNLIGVRLFKEGDTAAERRGFRTQRRRLNRRKWRLKLLEEIFDPYMAEVDKYFFARLKESNLSPKDSNKKYLGSLLFPDISDSNFYDKYPTIYHLRRDLMEKDKKFDLREIYLAIHHIVKYRGNFLEKVPAKNYKNSGASIGFLLEEVNDLYGNIIGNEDVAILDNDKFEDVEKIILNDEIRNIDKQKNVGRLLVKDKKEKNIVTAFSKAIFGYKFNLEDLLLIESDEKNKLTFNDENIDDIFNELSHSLNDNQMDLLTKTREIYFKFKLNMIVPTGYTISESMIEKYEMHKAHLKMYKEFINTLNAKDRKILKNAYSDYINNEKAKAANAQENFYKTVKKTIKENDSDTAKKIIGLIDEGNFMPKQRTGENGVIPHQLHQIELDRIIENQAKYYPWLAEENPVEKNRKFAKYKLDELVTFRVPYYVGPLIDKTESNKNEKETKFAWMVRKAKGTITPWNFENLVDRTESANRFIKRMTSKDTYIIGEDVLPASSLLYEKYKVLNELNNIKVNKKKLDVEQKQHVYLDLFTTRKNVTKDDLATSLNCDVESITGLTDNKKFNSSLSSYIDLKAILGNIVDDYSKNEDLEKIIEYSTIFEDGNIYKEKLSEISWLTDEQIEKLSNIHFKGWGRLSKKLLTQITNENGERIIDTLWNTSNNFIQVISDESIQAKLAEINGEYANKYNLEDILDEAYTSPQNKKAIRQVMKVVEDIEKAMKCEPTSIAIEFTREKRKSKLTNTRYKKISETYEKITDELISEYELGKLQSELDSKVNNMRDRYYLYFMQLGRDMYTGEKMNIDELHQKYDIDHILPQSFIKDDSLNNRVLTSKSVNIKEKSDKTAADLYAAKMGDFWRKLRKQGLMTEQKYKNLLTRTDSINKYTKQSFIKRQLVETSQVVKLAANILQDKYRNTKIIEIRARLNSDLRKKYELIKNREVNDYHHAIDGYLTTFVGQYLYKVYPKLRSYFVYDDFKKLDSNYLKHMDKFNFIWKLEDKKAEDVYDKVNDEFVLNVPEMKEYIRKIYNYKYMLVSKEVTTKNGAFYDQTKYNAKTINLIPIKKDKPTNIYGGYKGKVSSYMMLVKIQKKKEVIYKFVGVPRLWTDELDRLIDTDEKKALLKK

SEQ ID NO: 255 - protein, 1331 aa, Lactobacillus sanfranciscensis DSM 20451
MNKQPYNIGLDIGTSSVGWSATELDNRLLHIKGHNGIGVRLFKEGESAADRRGFRTTRRRLARRKWRLRLLNEIFATEIAKVDPSFFARLKQSNVSPKDPNKTMFENILFDDENLDDQKFHHDYKTIYHLRQAIINHPEQKFDIRLIYLAMHHIIKYRGHFLNQANVQDFKGGKIDLEKSFKALNDIFENQGRDLRLVTDKANQYVKVLSDNAKTRSDRKKELSKLLYVPIDKDTDKNSKKVTGEILKAILGNKAKFDVIFGIEVENPKEWVLTFNSDDFDDKIEGLSSQMTDEDSEILLILKELYFALNLSDILNNSVTDKNAKTLSEAMINRYDDHKNQLAMLKKVIDSSDKKHAKELKEAYSAYIDGENNKKISFEDLKKRIQKNLVDSELSQKINDLLDHDYFLPKQRSKENGAIPHQLQQQELDQIIESQKQYYPFLAELNPNEKRSRQAKYKLDELVAFRVPYYVGPMVEVTDSNQENNGKFAWMIRKEQGEITPWNFDEKVDRTETATKFITRMTTTDTYLIGEPVLPKNSLLYQKFVVLNELNNLKINQEIITPGQKQYLYEHVMKKNKRVTLKKIADALVIKGDYPYAPEVKGTTDQKNLNNGLTTYIDLAKIFGNELDDVDREADFEKIIEWSTIFEDQHIFALKLQELKWLTEKQRNQVVKLRYQGWGKLSKELLAGLVDDNGQRIIDLLWSDNQNFMQIVNQKSFKESIADHNGAHLEEKNLKDVINDLYTSPQNKKAIRQVILVVDDIINAVGYEPANIMMEFAREDSNDHRLTNSRSRQLENVYKDITNSWFDNDSVKDELEDKIKNKDKFTDRLYLYFTQGGKDLYTGEPLNIDDLSSYDIDHILPQSFILDNSLDNRVLTSQRNNRVSKEDQLPGELFGTKMHAFWKRLKAAHLISNKKYYNLTLTPNSISKFNNQGRFINRQLVETRQVIKLAAEILHNRYSEEKGTNIVTIKANLTHHMREKFNFYKNRNVNDYHHAFDAYLTAFVGNWLLQQYPKLKPYFVYGDFAKTEINNLKSFNMLYKFEQAHQLNEKDGKIAKDADALLGYMKNVYHFKKMLVTKKLETNHGALFKQTLYPSPAHDIKKRQLIKPKDNRPTDIYGGYTHEERKYMSLVKVIGKKDNEYRMANVPLLKINKNNDIKEILKSQFSNKKFEIVLPKVLKNQLFSENGALFVIGSKGYKYNANQLVLSDLDMKLLNDLSNNKSIDEVTINQLFKNIVDSTNKYMPLYEIKNLNEVVEKFNNLEFNDKKKTITDFLLATHANPTMSNLKNIGLPSYFGRFTSGNAGIKLSENANVIYQSPTGLFSRKVKISDF

SEQ ID NO: 256 - protein, 1346 aa, Lactobacillus saniviri DSM 24301
MVEHYAIGFDIGTGSTGFAGVDPNGKLVRMRGKNVYGVYRFKGGEAAADRRGFRTTRRRIKRRKWRLRFLKSFFEPYIAPIDPEFFLRQKYSADSPLDPKGIRADKGLLSDMSDQEFHAKYPTIYHLRYQLMHEKRQFDVREIYLAMHHIIKYRGHFLIEDGADNFDAKQIDFFDQFQRMAAVTAGLPELETLVVPDETQSDAFKRVLFDESQTKSDRQKVLASQLLDIQDNQSKAIKDFIAALTKAVVGMKANLATLTSTAIESTDKNDWTKPLGQLDDFLLKHEEDLDEDGYALIDAANQMYSAAVLAALVPEGMGFSEAMMARYAQHKKQLALYKQVIASLPDKTQRHELKDAYADYIEHAAQNPRDAFYKRVTKVLEGVDSADARTVMTAISHDEFLLKQRTLSNGKIPYQMQQHEFDAIIENQKAYYPWLATPNPVEADAKRLPYYLDELIGFRVPYYVGPMVTEKQSQFAWMIRKADGELTPWNFFDVVDREKTANRFIQRMQTTDKYILGEDVLPKHSILYQQFEVLNELNNIRVEKHPLTTEQKQFIYQRLFVDQQRKTITKKNLQDTLVAMGEFDKAPDIGGLAKEDVMMSSLATFADYSKILPEAISDPTRQNDIEDIIAWSTIFEDTQIFFDKLKTVDWLTTQQRKRLASIRYTGWGKLSKRLLQQIPTSKHTNVMAALWATSDNFMQILQDEQFQEGLYDANRLPEETLTPDEQVEKILDEAYLSPADKKGARKVIKVMNDIVRANHGVLPEQVFLESADDPQKNKRRSVSRSKQLEEKYRQAAQSFIDEAVKEELNAQIVNSAEFNDRLVLYFTQNGRDMYTGKRLDIENLGSYQIDHILPQSLVKDDSLDNRALTARDINAEMSNQFVSERFGLGPRAFWQQLKNNGLISGRKFRNLVMQRDEIDKYAPGFINRQLVETRQIIKTVEQIIHRLWPDIQIVTIKANLTHQVRSELGFPKVRELNDYHHAFDALLAARIGQYLLEHYAGLKPFFTYGEFKRGDTKKYGTTNFLRRLTKDNKDKKGELLPEVSDWIDSIDSIYNYKKIPVVWENTTNMSALFDQTIYPRPDRDTTKRKLIPTKLDKPTDIYGGYSSAKTAYMAVMRVQTKKGTEYPVFNIPVSIASQLNRITDQTMLKQQVKQFIINAEQSASKKKLYESGDVILSRVALGQRFTDKNYGEVFLISNMEVQNPQSLWLGRASQQRLTREPEGNEKPETSLADIYQQILKQVDRYFLAFNIRQQRQKLLGTLDQFTSLPVGRVNEQTRTDQNQRSIIARVMIVLGKGSREEKFPEFGLSALGRLVRTGGITLSEDAQIIYQSPTGLFERRVALKDL

SEQ ID NO: 257 - protein, 1345 aa, Lactobacillus senmaizukei DSM 21775
MVEKYGIGLDIGTSTLGWTSVDENGKIQRLKGQTALGTRLFNEGQTAEERRGFRTTRRRIQRRRWRLRLLREIFDEPIGSVDAGFFARQKMSSLSPQDDRFEDTYRLFNNQTDKAFHDEYPTTYHLRQALMNSDRQFDIREIYLAIHHIVKYRGNFLRSGKPADFKTGKLDLKEKFEEINADWQTLISEDAPQLPVDDLTTIKAVLVDGSRSRSDRQRGLVKLWMANETVEKNWKPVMTELAKAILGLKTKLYLLTGLDLPKEDQKAWTFSLDTLEDHQGDIDSFFDDHAQQLIDRLAELRAMIQLTEIIPSGLNFSQSMVQRYEAHRSHLEMYKQYALDQTDPKRTKALRAAYNAYIDQHEIADDFYTAVKRVTKDDQSETAEEINRLIGLEQFMPKQRTKENGVIPYQVHQQELDQIIAHQKKYYPFLGTENPVIDHRESQPYMLDELVSFRVPYYVGPMVAANPELKTTENPFAWMIRKAQGEITPWNFDEKVDRKGSATAFIERMKTTDTYLLGEDVLPQQSLLYQRFMVLNELNNIRIDDELLTTNQKQWVFDRVFKGKGTISAKHLQDALKHHGETDGLPKISGLADPTKFNSALTSYRDFQKWLPNDIDRKDRTADIETIINWSTVFEDTHIFVEKLKEIEWLTADQRRRIASNRYRGWGRLSKHLLTEIKDEQGLSIMDQLWRTQHNFMQIVHEPDYAKQIEAANTVGMAKQDIGTVINDLYTSPQNKKAIRQVLAVVKDIQNAHHGVAPSWIFMEAARGADQNPQRSRQRQRQLQDLYAKTAADLVDTEVQQELTDKIKDKANFTDRLMLYFLQNGQDMYSKEKLNIDRLSEYDIDHILPQALIKDDSLDNRVLVHQSINRNKSDTFASEKYGAKMQGAWHQWRAAGLISARKLRNLEMRPDEISKYATGFIRRQLVETRQVIKLVTEILSHQYNPEETKLVSVKAGLSHELRREAGLPKLRDLNDYHHAIDAYLAARIGTYLLKRYPRLERFFVYGQFQTSRLDLRRFNFIHDLVKSKQGVIVDSDTGEILWDRQKDIDYIKHLMGLKHLLVTHEVYDSAAEMYAQTIFKASDNDSKVLIPTKNDRPTAIYGGYTKRRNGYLAILKITEKKAETYRVVGVPTLYMSQLATARSHSVEAEKALLKSLMAPEILSESKVVSFEVVVSHVHLNQLVRDTVFGPAHYFGLGPFRYVRNFHQLVLPFKDQEILVKRTPTDEELNTVFEDICWQVENYFAVFDINGFRNALKKSIDKFEQLPIENVFKDKKLVTQGKKEVLAFVMQGLHANASYRNLKVSLGIKTPLGQLQLTKFMLSRDAELIDESPTGLFRRIRRLKDL

SEQ ID NO: 258 - protein, 1138 aa, Lactobacillus tucceti DSM 20183
TCVFLVKLGGFEVDRKISLGLDIGVSSVGYSVIDVDTGKVLELGSRLINGKIGTENQARREMRGTRRLINRKKQRRKDTVKLFNEFKLIDSKKDEHYFDHFANNSDPYELRVKGLSEKLSLSEIADGLYHIVKRRGISYDLKDADEESEGSEYENGLKINNSELKNQTPAQIQLKRLNEYGAIRGKVVIDEEKILLNVFPTKAYLDEAKRIIEKQREFYPGILTEEFEEKYCQILTRKRDYFVGPGSEKSRTDYGIYKEDGRTLNNLFEELIGHDKIYPEELRASGASFTAQLFNVLNDLNNLHISSYEDQKLTTENKEQIISELKSTTSNVNMMKLIQKIAGCEESDISGYRTDKNYKPEISSMRIYRKVHKKLLESEIDITNWPDDFINKLSFILTLNTENGEIRNQLKNRLQPEYDFLTDELIQTIIDNKESFDIKSNNKWHRFSIKTMELLIPEMIKRPVEQMTLINEMGLIKNSGKKFSNYKYLPYKKIAEDIYNPVASKSVREALKIVNAILKEYGHIEYIVVEMPRDKNEDEAKDQIEKFQKANGRLKDAALEEFTEAIGDKSTVDKKLGVHRSKLLFKIRLWYQQRGMDLYEGKPISAVDLLNNPDSFQIDHIIPQSVSFDDSFNNKTLCNSGLNQIKDKKTPFEYMNEGYGQGFDSMKAMVMKNPRIDHNKRKNYLFSENVSDIETRKRFISRNLVDTRYASRVVLNNLQEFFKEKESDTKISIIRGKFTSNLRKHWKINKNRDTYHHHAIDATIIAATPFLNIWKKGSSIFPSNVESEDFFDIKTGKIIGNDEFNKYAYDEPYNGFYNELRNATDRIKFSHQIDKKMNRKVSDSTIYSTRVAKSPKNKKESEYIVAKIKNIYDADEYAKFKRIYDKDKTKFLLNKYDPRSFNHLEKIMNTYPDSIERTMSNNKVKVVRISPFELYRQDHGPVKKYSKKNNGPEIKQLKYLDKKVGSSIDVTPDNAKNKHVILKSLKPWRTDIYLNHETGEYEIMGIKYSDLKFNKGEGYGIKKAKYLEIKHREKVSDDSEFMFTLYKKNRIKVENMDESVEMLFWSRTMDSQKGYAELKPIYKYKTEDDNWPIYGNAKKQIIKKLIPKNCKIWKVNTDVLGNPFYVEKEGEYPKDVLD

SEQ ID NO: 259 - protein, 1313 aa, Lactobacillus versmoldensis DSM 14857
KNNLWGARLFKEAETAQVTRGHRSMRRRYRRRRNRLNWLDELFADELAKIDPSFLLRMKNSWVSKKESTRKRDPYNLFIDEKYNDVDYFNQYPTIFHLRKELITEDKKVDIRLIYLAIHNIIKYRGNFTLENQNFDISQLSSNFSQQISDFFALFSDFGVIMPEDFDPDKISDILLNPNLSPSGKVSEAIATISPKTNVKAKIKIILLLLVGNNGDLKKLFDLETTEKIAVKLSSRHIDSELPIILSELNEQQENIITIANSIFGSIILKDFLGDETSISAAKVISFEDHKQDLQKLKTMWRETSNKEAVKAGKKAYEDYIGHEDSETFYKKIKKFLEKAQPVDLANKALAEIELENYLPKQRNRNNTVIPYQLNENELIAILDHQEKYYPFLKENRDKILSLLTFRIPYYVGPLQDSNNNRFSWMTRKASGAIRPWNFSEKVNVEQSSNDFIKRMRSTDTYLIGEPVLPKKSLIYQCYEVLSELNNTRVKDGSSNPKRLDVTIKQRIYNEIFKNQKSVSVKVLQNWLIKESYFKSPEISGLADKKKYLSSLSTYIDFKKIFGQRFVDDPVNSPQLEELAEWLTLFEDKKILLIKLQNSKYSYDQATINKLSTMRYQGTGKLSKKLLVDLKTTKKSIGKSGAESLSILDLMWSTKDNFMQIIHDADYTFEQQIKEFNYDTEDELTPLEKVANLHGSPALKRGLNQSIKVVADIVKFMGHDPEKIFIEFTRSDDFSKLTISRYRRIKKQYLEIAKAIKKIPAEFKDIKEYQTQLEENKGKLASERLMLYFLQCGHSLYSNKPIDLNMINSSKYHVDHILPQSYIKDDSLENKALVLASENENKIDNMLISHDIIATNLPRWQALKDQNLMGSKKFADLTRTTVTENQKKGFIQRQLVQTSQIVKNITLILNDLYKNTSCIETRATLSSEFRKAFSNFDETTYHYQFPEFVKNRDVNDFHHAQDAFLACVIGEYQLKKYPKDNLRLVYDQYSKFLDSLKKDTRKKNGRMPRYTQNGFIIGSMFNGKTYVDDNGEIIWDQKIKESIRKTFNYHQFNVVRQTIEQHGKLFNDTIQPHSDRYKLIPLKTNRDPAIYGGYNNDNNAYSVVLDVDGKKKINGIPIRIANQLKSDELDLSSWLENNIKHKKPMTILIDKVPKYQRIINEETGDLLITSANEVINNVQLFLPSMYTALISLLDSTKTEMYSKLLSNYEANILIDIYDYLLTKLKNNYPLYRKEWAKLAEHRDDFIESDLVTQASTLQQLIKFMHADPSNVNLKFGNFKGNRFGRKNGNIKLSKTDFIYESPTGLFKSIKHID

SEQ ID NO: 260 - protein, 1356 aa, Lactobacillus zymae DSM 19395
KGFINLYKKYGIGLDIGTSSIGWSVVDEYGHIIRVKGQTGLGVRLFREGQPAADRRTFRTTRRRLGRRRWRLRLLREIFDPYIAAQDPNFFARQKASAIAPGDSRFKAVYRLFNDQTDRQFYDKYPTVYHLRQKLMTEKRQFDIREIYLAVHHIVKYRGHFLTGGAAKNFKPGKLDLNTYFATINAQLAAIFMDSQVELPQLDWDAVVSLLTNDQESPSDRQKALTKMLVAQGDATQKRFYTEFSKALLGLKAKLYVLTGFEGDKTDQKALTLSLETLDDHQDDVTQLLGDEQRQLVELLARVQSAIQLAIIIPNGKTFSGQMVQQYQTHYDQLRLLKDYREQLTDQKHRRALKQAYADYLANDQDQDALVKAVEKVLKQNQPLSTVGVRLQTAIDAGDFLPKQRTKANSVIPHQIHQQELDRIIEAQSVYYPWLAEENPVAAHRSYAPYKLDELVDFRVPYYVGPLVQPQADKAAKETKFAWMTRKEAQSTTPITPWNFEQEVDRNASANAFIQRMKTTDTYLLGEDVLPKNSLLYQRFEVLNELNNVRVDGKLLTIAEKQRLFQDLFVDRSQASVTIAQLQANLIAHGAAKDRVEIKGLADPKRFLSSLTTYHDYAQIIPEALEQPDKRADIEKIINWSTIFEDTSIFKEKLQEIAWLTPDQRRQLSQKRYRGWGQLSDKLLTQLRDATGQSVMDLLWTEPNNFMQIIRRTEFQQAIARVNQTDLKQQDLATTINDLYTSPQNKKAIRQVLLVVADIQTAMHEVAPSWLFIEAARGPEQNPKRKLARQQQLLEAYKTSAKEIVNEAVKEKLLSAIDDHQKFEDQVVLYFQQNGLDMYTGKPLDFERLSKYHIDHIIPQSVVKDDSLDNRVLTTPEENERKGARVPGPLYASQQGRWRLLQRAGLISQRKLDHLLLRPEELDQQATGFVARQLVETRQVIKLITNILSQQYDPEQTKLVSVKAGLSHQFRTRLNLPKLRELNDYHHAHDAYLAARIGTYLLQRYPNLERFFVYGQYQKTRFDLKRHFNFIGEMLKGKPEDAVIVKAPHSETVIWDKQDEVKQLKKIMEYRHLLVTHEVYDNHGALFNQTIHPAKNPKNRKLIPRKTTQSTELYGGYSGETTGYLAIARTVTKNKISYQVLRVPTRLVGRLQRSSESAQRQILTDWFAPSFVSRGKQQPFEIVLRHVFKNQTVIDDIHEQSHRFGLRSDTYYCNQQQLVLSLEQQRMIIDQKLNNTNKLMVVYEAVCDQVAKYFPLYRMNHFKESLLEAGPKLAELPINTVQSKNGKLKLGQRSVLLQTMQGLHANPETKDLSIIGCPKYFGKLQVSSGIKLTENAVLIHESPTGLFQRRVRLSDL

SEQ ID NO: 261 - protein, 1355 aa, Leuconostoc gelidum JB7
MTYSIGLDIGTGSVGWAVIGDDYRLKRAKGKNLIGVRLFDSATTAAERRGYRTTRRRLSRRHWRLRLLNDIFASDLAEQDENFLPRLKYSWVNPDDEQNPQLNSDVANGALFGSSETDKAFHKNYPTIYHLRHELMTDTAKHDLREVYLAIHHIVKYRGNFLNTADKINAENSFNVDLFIAALDEYNEFLETPITSIKDAQLFSDKLTDINARNKSVRVENAMSETYDDKSKIFKAILTALVGNTANFQTIFDLSDLEKDEAKNFKFKLDLEDVETKLDVVRAKLSDEQNAFLEAVLIAYDGITLKMILGDYKSISQSMIESYKSHQRDWKYIKNNVRLNEQKIEPDKNSVKFFKLDPKKLIYPSNLAYLQVISSNEDEHRKGLDYFKTAIQDADILQRIENDTFLPRQRTKRNGVLPYQLHLAELEQIIKKQSKYYPFLANIYTQDNKTENKLIGLLKFRVPYYVGPLVEAEKVTGDGKNHWLIKKELQENTPITPFNFDDVVDKDKSGEQFIKRITGTDSYLIGEPTLPENSLLYQKYNVLQELNNVRNERHQRLPIKVKQDIFEHVFKIDKNVNAKKVMAYLKLNGYGDFQIAGLSDTRTGKFNSNLSSYNYFVDLLGREKTEKIREDRLEEIIEIQTVFEDKILVAKRLSNLDFLTPQEKSKLSAKHYTGWGRLSQKLLTTQFIKTALSEAGDIIPQSHSIIDLLYYTDKNLMEILNDKTFNVRNWLTEQNKGTESGNSLYDQIDALAGPKDIKRGITQVFSIIDDIKKAMGSNPETVYLEFARETQTSRLTNSRLNRVQEIYNSPELKTEFAYLAKKLEAETKESIHDDRLYLYYLQEGRDMYTGKEIPFDQISSNYDIDHIIPQAFTKDDSLDNRVLVNRATNARKSNSPTFTNDIIDNRKSWWQSLVKRGLMSKEKFERLTDKRKTFSENQTNHFIARQLVETRQIIKNVADLIKNNYDGTQAVAIRASLTGEMRRYLDWPKNRDMNDYHHAHDALMMATVGKYVDRRGFFDNGSVSDGAGNAYNLYTKDWLVAARVGTRNDSQRVNPYGFIVGSMNSKAVRQQVNKETGEIVWGNENLDYLRHVLSYKKILVTRRLSGSSGRLYAETLFSPNPKAKLIAQKANRSVALYGGFTKAESAYTALVEFNKKGDRSYKLIKVPMAIANRVNDKQITVTAYIASLNLRDFSRVVLEHLPLGTLIRESDGSEFYAASSEYKHNAKELWAPKEILRSSKKLDKATADNLIDIFDFLTNDKTISNFKFYEKDLLHLKNVRDKFVEASDEIKIKVLSDVIYELHNDAGWRDPFKHIQEKPAWTMLQVKGGIKLSEKAAIVYQSPTGLFETITIVGE

SEQ ID NO: 262 - protein, 914 aa, Leuconostoc pseudomesenteroides 4882
MKYSVGLDIGTGSVGAVIGEDYRLKRTKGKNLIGVRLFEGADTAAERRGYRTTRRRLSRRRWRLRLLNDIFASELSKIDENFLPRLKYSWVNKNDTDNVHFGVGVFDNSEQEKAFYQDYPTIYHLRQKLMTDNRQHDLREVYLAIHHIVKYRGHFLNSGEISANSSFDAQKFLELLREFDNTFYPDAVKFLNLDQLDLPDKISSEISDSKISKSERVDRVLQHVQLANSGAKKILKAILNAVVGNSVDSVAMFSLSDLDKEEKKKINHPVTDSKPFKYSDKEVEAKLDELSNLLQDEQKIEFLSLLKLSFDGLTLKMLLGNAKSVSEAMVERYKVHKDDLKFIKENILNSFSKDKKKEFDKYYEAHLAEKDVDNVDKYFKKIIDDSIISKDKKIELLQKIDDHDFLPSQRSKINGAIPHQLHRNELDKIISQQSKYYPFLADSYTQNGKTETKLAGLVNFRVPYYVGPLVSKENADRNNPDGGQNHWVEFKENTSLSNLTPWNFNEIVDKDKSAAKFIERLTGMDTYLIGEPTLPQNSLLYQKYNVLQELNNIRVDNHKLDVKIKQDVFEHLFKTQNSVSAKDVKNYLIANGYAAPSIQITGLSDTNEKTFNSKLSSYNYLVDKLGRTFVESVKSDVLEKIIELQTVFEDKTVLLRQLSMISELTLAQANQLAEKHWTGWGRLSRKLLSSKVVDVNKITNSTFYPATSRQTIIDTLYHTQLNLMEIINNAEDLYGVRQWISEQNKSDSSDTNDVYDQIQELAGDKKIKRGITQSFRILDDIVKAMGGEPERVYLEFARENQQSGVSFSRKNLLSKLYENDSLKQTFKELKSQLESETKENLQNDRLYLYYLQQGRDMYSNDELNIDQLSSYDIDHIIPQAYTKDNSFDNRVLVSSKANRLKRMLLWYPVKLSKK

SEQ ID NO: 263 - protein, 1392 aa, Oenococcus kitaharae DSM 17330
MVFMARDYSVGLDIGTSSVGWAAIDNKYHLIRAKSKNLIGVRLFDSAVTAEKRRGYRTTRRRLSRRHWRLRLLNDIFAGPLTDFGDENFLARLKYSWVHPQDQSNQAHFAAGLLFDSKEQDKDFYRKYPTIYHLRLALMNDDQKHDLREVYLAIHHLVKYRGHFLIEGDVKADSAFDVHTFADAIQRYAESNNSDENLLGKIDEKKLSAALTDKHGSKSQRAETAETAFDILDLQSKKQIQAILKSVVGNQANLMAIFGLDSSAISKDEQKNYKFSFDDADIDEKIADSEALLSDTEFEFLCDLKAAFDGLTLKMLLGDDKTVSAAMVRRFNEHQKDWEYIKSHIRNAKNAGNGLYEKSKKFDGINAAYLALQSDNEDDRKKAKKIFQDEISSADIPDDVKADFLKKIDDDQFLPIQRTKNNGTIPHQLHRNELEQIIEKQGIYYPFLKDTYQENSHELNKITALINFRVPYYVGPLVEEEQKIADDGKNIPDPTNHWMVRKSNDTITPWNLSQVVDLDKSGRRFIERLTGTDTYLIGEPTLPKNSLLYQKFDVLQELNNIRVSGRRLDIRAKQDAFEHLFKVQKTVSATNLKDFLVQAGYISEDTQIEGLADVNGKNFNNALTTYNYLVSVLGREFVENPSNEELLEEITELQTVFEDKKVLRRQLDQLDGLSDHNREKLSRKHYTGWGRISKKLLTTKIVQNADKIDNQTFDVPRMNQSIIDTLYNTKMNLMEIINNAEDDFGVRAWIDKQNTTDGDEQDVYSLIDELAGPKEIKRGIVQSFRILDDITKAVGYAPKRVYLEFARKTQESHLTNSRKNQLSTLLKNAGLSELVTQVSQYDAAALQNDRLYLYFLQQGKDMYSGEKLNLDNLSNYDIDHIIPQAYTKDNSLDNRVLVSNITNRRKSDSSNYLPALIDKMRPFWSVLSKQGLLSKHKFANLTRTRDFDDMEKERFIARSLVETRQIIKNVASLIDSHFGGETKAVAIRSSLTADMRRYVDIPKNRDINDYHHAFDALLFSTVGQYTENSGLMKKGQLSDSAGNQYNRYIKEWIHAARLNAQSQRVNPFGFVVGSMRNAAPGKLNPETGEITPEENADWSIADLDYLHKVMNFRKITVTRRLKDQKGQLYDESRYPSVLHDAKSKASINFDKHKPVDLYGGFSSAKPAYAALIKFKNKFRLVNVLRQWTYSDKNSEDYILEQIRGKYPKAEMVLSHIPYGQLVKKDGALVTISSATELHNFEQLWLPLADYKLINTLLKTKEDNLVDILHNRLDLPEMTIESAFYKAFDSILSFAFNRYALHQNALVKLQAHRDDFNALNYEDKQQTLERILDALHASPASSDLKKINLSSGFGRLFSPSHFTLADTDEFIFQSVTGLFSTQKTVAQLYQETK

SEQ ID NO: 264 - protein, 1378 aa, Pediococcus inopinatus DSM 20285
MKNKDYSIGLDIGTSSIGFAVVDENNHVMRVKGKNAIGVRLFDEGKPAADRRAFRTTRRRLSRRRWRLKLLREIFDSYITPVDEAFFIRLKESNLSPKDSKKQYSGDILFNDRSDKDFYTKYPTIYHLRNALMTEHQRFDIREIYLAIHHIVKFRGHFLNATPANNFQVGKLDLDQKFEDLNDIYQRVFPDDSIEFRIDNLEQIKAVLLDSKRSRSDRQRSLVDDVYQTSEDKEVEKQNKAVATEVLKAILGNKAKLNIIANVEVDKEAAKEWTITFDSESIDDDLAKIDGQMTDDGRAIVEILRSLYSGITLSAIVPENHTLSQAMVAKYDLHKKHLTLLKKLINSMTDTKKAKNLRAAYDGYVDGVKGKVLTQDEFYKQIQSNLDESVEASEIQTYIDQDIFMPKQRTKANGSIPHQLQQQELDQIIENQKEYYPWLAELNPNPDKKRQQLAKYKLDELVTFRVPYYVGPMITAEAQKKQSGAEFAWMIRKESGNITPWNFDQKVDRMATANQFIKRMTTTDTYLLGEDVLPSQSLLYQRFEVLNELNKIRIDRKPISVELKQQIFNDLFKKFKNVTIKHLQDYLVAQGQYSKRPLIEGLADEKRFNSGLSTYNDFCGIFGAKLVDENDRQADLEKIIEWSTIFEDKKIYRAKLNDLAWLTDEQKDKLATKRYQGWGRLSSKLLIGLQNSEHRNIMDLLWIGNENFMQIQADSDFAKLIKDANQNALQNNDSQDVINDLYTSPQNKKAIRQILLVVHDIQNAMHGQAPTKIHVEFAKGEERNPRRSVQRQRQVEAAYEKASNELVGANVREELKDAITNKRDFKDRLFLYFMQGGVDMYSGEPINIDNLSRYDIDHILPQAFVKDDSLNNRVLTDAEKNRRKSDAVPNELFGAKMRVTWERMKEQGLISKGKYRNLTMNPENINKYTENGFINRQLVETRQVIKLAVNILADEYKENTQIISVKADLSHQMREDFELLKNRDVNDYHHAFDAYLAAFMGNYLLKRYPKLRSYFVYGDFKKFTQKEIKLRRFNFIYDLKHEDQVIDKETGEILWNKNEDIAYIRHLFAYKKILISHEVSERRGALYNQTVYKASDDKASGQGSKKLIPIKSDKPTEIYGGYTGRTLAYMTIVKVTKGKKISYKVVGVPTAVLAKMAGVRQGSQEEQDKLYGVLKPQFTHQKENKKTGEITETVDKFDIIVPKVKYQQLVNDNGQLFMIGSDTLPYNAEQLVLSKESVQTINNPGIKDEGSDEESENKKLDNVYDEIVLCMNKYFPLYDNRGFRNSITNGKNKFLKLPIKNIYKNGKLINVGKREVINRILQGLHANASVTDLSNLGIKSPFGFLQKGAGLSLSGEAQLIHQSATGLFEHRVQLNKIK

SEQ ID NO: 265 - protein, 1374 aa, Pediococcus lolii DSM 19927
SGEKRYSEINNVEEEFYMGDRKYNLGLDIGTSSIGFAAVDENNQPIRVKGKTAIGVRLFEEGKTAADRRGFRTTRRRLSRRRWRINLLNGIFDAHLAEVDPTFLARLKESNRSNLDPKKSFQGSLLFPERKDYQFYKEYPTIYHLRKALMEKDRKFDIREIYLAVHHIIKYRGNFLNGTPMRSFKVENIELDTLFDRLNQLYEEIIPDNELAFDLEQVADVKEVLSSTTIYKMDKKKQLVKMMLLPASNKALQSENKKIVTQFVNAILNYKFKLDVLLQVETDADWSLKLNDEGADDKLEEFTGDLDENRLEIIDLLQRLHNWFSLNEITKDGNSLSAAMVEKYKDHRHHLELLKKVIEDHSDAKKAKALKETYTAYVGKTDDKTQNKDDFYKAVEKNLDDSPEAKEIKRLIQLDQFMPKQRTGQNGAIPHQLHQQELDQIIEKQSKYYPFLAEPNPNVKRRKDAPYKLDELIAFKIPYYVGPLVTPEEQAQNKENVFAWMKRKAAGPITPWNFDEKVDRMESANRFIRRMTTKDTYLFGEDVLPAESMIYEKFVVLNELNNLKINGRHLSLKDKQDIYNDLFKQQKTVSIKALQNYYVTKKKAATAPTVGGLADPKKFLSSLSTYIDFKNMFGERVNDPQFQEDLEQIVEWSTIFEDRGIFKAKLQALGWLSEKQIQQLVAKRYKGWGRLSKKLLTGLKNAEGYSILDEMWHSTENFMQIQTRPEFAALIQQANEKQFEGNDPDNVWENIENILGDAYTSPQNKKAIRQVVKVVQDIEKAVGNPPEKIAIEFTREAAANPQRTQSRLRTLEKLYESAEEVVDAGLTAELAEFKENKHVLSDKYYLYFTQLGRDVYTGDTISLDRLNDYDVDHILPQSFIKDDSLDNRVLTIRAVNNGKSDNVPAKMFGKKMGSFWRYLLDNGMISKRKYNNLITDPDNISKYAQKGFINRQLVETSQVIKLTANILNGIYDKDTEIIEVPAKMNSQMRKMFDLVKVREVNDYHHAFDAYLTIFIGNYLYKCYPKLRPYFVYDNFKKFGNKEDIGHKRFNFLGKIERDKKVVAPETGEILWSNVAPNETIKQIKKVYDYKFMLTSHETYTKHGALFNQTIYSAKASKTMIPIKNDRPTKLYGGYSGNEDAYMSIIRLSDKKKTYKVVGISMRDASKLKAYENNAHEEYLKKLKEVIEQQFLDSGKKTKADFEIVIPKVNYHQRMQDGTKQFRIGSSKYVHNTKQLVLSEKTLKAIRNNKQYNGDAEKDLINAFDEILTIVNDSFSIFDIRSFRKKLNESRDKFVSLPVEDTKEKSKVIKGKRETLKQILIALHANGTSQDIPQLGLKSFGKMVKTGGLTLSENTALIHQSPSGLFEHKIKLSDL

SEQ ID NO: 266 - protein, 1374 aa, Pediococcus parvulus DSM 20332 A; identical to SEQ ID NO: 265

SEQ ID NO: 267 - protein, 1375 aa, Pediococcus parvulus DSM 20332 B
MENKKYSIGLDIGTSSIGFAVVDENNRVMRVKGKNAIGVRLFSEGQPAADRRSFRTTRRRLSRRRWRLRLLREIFEPYINPVDEAFFMRLKESNLSPKDANKHYSGDILFNDQSDQKFYEKYPTIYHLRHALMTEHRKFDVREIYLAIHHIVKFRGHFLNAASASNFTVGKLNLEGKFDALNEIYQRVLTDDPFALRTDNLDHIKEILIDNKRSKADRQRTLTGDVYQSSEEKEIEKRNKAIATEILKAAVGNKAKLNVITNVEVDKEAAKDWSLTFDSETIDDELAKVDGQMTDDGREIIEILRSLYSGITLAAIVPENHTLSQSMVEKYNSHKAHLKLLKDLINNMTDTRKAKNLRAAYDGYIDGVKGKVLTRDDFYKQIQGNLDDSAEAQKIQDVMDQDEFMPKQRTKANGSIPHQLQQQELDQIVENQKEYYPWLAEENPNETRRGVAKYKLDELVTFRVPYYVGPMITAEDQEKQSGASFAWMKRKEPGNITPWNFDQKVDRMASANQFIKRMTTTDTYLLGEDVLPAQSLLYQRFEVLNELNKIRIDRKPISIELKQQIFNDLFKKFKNVTIKHLQEYLVATGGYDKRPRIDGLADEKRFNSGLSAYHDLHGILGAEVVDANDKQDDLEKIIEWSTIFEDKKIYRAKLDELTWLTDSQKEKLATKRYQGWGRLSKKLLSGLRNSDHRSILDILWITNENFMQIQADPDFAELVKNANQGMLGKNNSQDVINDLYTSPQNKKAIRQILLVVHDIQNAMHGQAPAKIHVEFARGEERNPRRSIQRQHQIEAAYDKVTSDLLVDAGVRQELKDAINDKRDFKDRLFLYFMQGGRDIYNGEPINIDRLSSYDIDHILPQAFVKDDSLNNRVLTDAEGNRRKSDAVPSELFGAKMRSTWELMREQGLISKAKYRNLTMNPENINAHTENGFINRQLVETRQVIKLAVNILADEYTEDTQIVSVKADLSHQMREDFELLKNRDVNDYHHAFDAYLAAFIGNYLLERYPKLQSYFVYGDFKKFSQKDTKMRRFNFIYDLKHSDQIADKNGKKIWHKTNDLDYIRHLFAYKKILISHEVSERRGALYNQTVYKASDDKASGQGSKKLIPIKANKPTEIYGGYTGKTLAYMAIVKVIKGKKIAYKVVGVPTSALVQLAGIEHGSQEELNRLYDVLKPQFTQLKKNNKTGEISETVSKFEIVIPRVKYQQLVEDDDKLFMIGSDTYPYNAQQLVLSEGALKVINNVYRKGENSDKQESYKLDDVYDEIIIAMKKYFPLYDNRGFREKVAEGKSTFENLPISNEFKNGKLTKIGKKEVINRMLQGLHANATMTDLKILGIKSPFGFMQQPTGIALSENAQLIYQSPTDLFERRVQLNKIK

SEQ ID NO: 268 - protein, 1382 aa, Pediococcus stilesii DSM 18001
SDIVRIDNGLEELKVNNRIYNIGLDIGTSSVGFAVTDAQDKLVRVKGKTAIGVRLFEEGHTAAERRGFRTTRRRLSRRKWRINLLNQIFEPYISEIDPTFFARLKNSSLAGKDKKFEGSLLFPDRTDYQFYKDNPTMYHLRKHLMEKDRQFDLREIYLAMHHIIKYRGNFLNTTPMNHFKNEEIDFSALFSRLNELYQEIDDENIFELNIENVDEIKKILLNHDLFKMEKQKQVAKLLNVDTDDKQLKKENTALASNFSKAILGYKFNLALVTKIPDQDKKEWTISLGDEDFDDRLDNVPVALTESQLEVVEVLHSIFNSISLNEIVENGETLSSAMVRKYNDHKHDLKLLKNVMTTLEDRKKAKKIQGIYNVFVGKDTDLISDKDKNKYKDKDEFYKEIQKNLDNSSDAEEIIKRIKQDQFLPKQRTSKNGVIPHQLHQRELDLIIENQAKYYPFLKEANPNKKRLKQAKYKLDELIAFKIPYYIGPTSGAENSDFSWLKRKKDGQITPWNFDEKVDRIESANRFIRRMTTKDTYLLAEDVLPLESLIYEKYSVLNELNNVRINRQKLSVNDKQDIYNELFKNSKTVTLKQLQKYFEVTKKLKTVVVEGLADPKKFLSNLGTYHDFKLIFGDIVDDPEYQTDLENIIEWSTIFEDRGIFNSKLNEITWLTDEQRKKVLSKRYQGWGRFSKKLLVGLKNSQGNSILDELWNTNLNFMQLQSQDDFAELIHAENAKQFKANDPDNPWNGIDAILNDAYTSPQNKKAIRQVVKVVQDIEKAMGNKPQKIAIEFTRSADKNPRRTDSRIKRLSDIYKEAAEKVVGESLKLELNEYLTSKKKMTDKMYLYFTQLGTDIYTGKKIDIDQLNNYDIDHVLPQSFLKDDSLDNRVLTNRSDNSEKSDTVPLHKFGAKMGNFWRQLADEGLITKRKYKNLTTDPATIDKYTIQGFIRRQLVETSQVIKLTANILGGLYPEETEILEIPAKLNHQFRDMFDLVKVREVNDYHHAFDAYITVFVGNFLYRRYPKLRSYFVYGDFKKLNKTDDDIRKFNFLNLFNKDKVEDNETDEILWSKAESIRDIKNIYNYKFMLVSREVYTRHGAMFNQTIYPASKNDSKKLIPIKKGKDTAIYGGYSGNTDAYMAIVAVEDKKGEKFKVVGVPTRAVSRLEQLAADDHDQYLTALHDVLKPNFTKIKTNRKTKAKEEVTTPFRILVGKVGYRQLIQDGQVKMMLGSSAYKYNAKQLVLSEKSLKVIKNNKKYNPDDENQDLIDVYDEILGVVNRAFNLYDTNGFRKKLNDNRVKFVELPINNIFDGTKLVQMGKRAVLTQILNGLHANAALGDLKALGISTPFGKMQSKSGIPLSMDASLVYQSPTGLFERKLNLSDL

SEQ ID NO: 269 - protein, 1370 aa, Steptococcus agalactiae GB00300
MNKPYSIGLDIGTNSVGWSIITDDYKVPAKKIRVLGNTDKEYIKKNLIGALLFDGGNTAADRRLKRTARRRYTRRRNRILYLQEIFAEEMSKVDDSFFHRLEDSFLVEEDKRGSKYPIFATLQEEKYYHEKFPTIYHLRKELADKKEKADLRLVYLALAHIIKFRGHFLIEDDRFDVRNTDIQKQYQAFLEIFDTTFENNDLLSQDVDVEAILTDKISKSAKKDRILAQYPNQKSTGIFAEFLKLIVGNQADFKKHFNLEDKTPLQFAKDSYDEDLENLLGQIGDEFADLFSAAKKLYDSVLLSGILTVTDLSTKAPLSASMIQRYDEHREDLKQLKQFVKASLPEKYQEIVADSSKDGYAGYIEGKTNQEAFYKYLSKLLTKQEGSEYFLEKIKNEDFLRKQRTFDNGSIPHQVHLTELRAIIRRQSEYYPFLKENLDRIEKILTFRIPYYVGPLAREKSDFAWMTRKTDDSIRPWNFEDLVDKEKSAEAFIHRMTNNDLYLPEEKVLPKHSLIYEKFTVYNELTKVRFLAEGFKDFQFLNRKQKETIFNSLFKEKRKVTEKDIISFLNKVDGYEGIAIKGIEKQFNASLSTYHDLKKILGKDFLDNTDNELILEDIVQTLTLFEDREMIKKRLDIYKDFFTESQLKKLYRRHYTGWGRLSAKLINGIRNKENQKTILDYLIDDGSANRNFMQLIKDAGLSFKPIIDKARTGSHSDNLKEVIGELAGSPAIKKGILQSLKIVDELVKVMGYEPEQIVVEMARENQTTAKGLSRSRQRLTTLRESLANLKSNILEEKKPKYVKDQVENHHLSDDRLFLYYLQNGKDMYTDDELDIDNLSQYDIDHIIPQAFIKDDSIDNRVLVSSAKNRGKSDDVPSLEIVKDCKVFWKKLLDAKLMSQRKYDNLTKAERGGLTSDDKARFIQRQLVETRQITKHVARILDERFNNELDSKGRRIRKVKIVTLKSNLVSNFRKEFVFYKIREVNNYHHAHDAYLNAVVAKAILTKYPQLEPEFVYGDYPKYNSYKTRKSATEKLFFYSNIMNFFKTKVTLADGTVVVKDDIEVNNDTGEIVWDKKKHFATVRKVLSYPQVNIVKKTEIQTGGFSKESILAHGNSDKLIPRKTKDIYLDPKKYGGFDSPIVAYSVLVVADIKKGKAQKLKTVTELLGITIMERSRFEKNPSAFLESKGYLNIRTDKLIILPKYSLFELENGRRRLLASAGELQKGNELALPTQFMKFLYLASRYNESKGKPEEIEKKQEFVNQHVSYFDDIFQIINDFSKRVILADANLEKINRLYQDNKENIPVDELANNIINLFTFTSLGAPAAFKFFDKIVDRKRYTSTKEVLNSTLIHQSITGLYETRIDLGKLGED

SEQ ID NO: 270 - protein, 1370 aa, Steptococcus gallolyticus ATCC BAA-2069
MTKKNYSIGLDIGTNSVGWAVITDDYKVPAKKMKVLGNTDKKYIKKNLLGALLFDSGETAEATRLKRTARRRYTRRKNRLRYLQEIFAEEMTKVDESFFYRLDESFLTTDEKDFERHPIFGNKAEEDAYHQKFPTIYHLRNYLADSSEKADLRLVYLALAHMIKYRGHFLIEGKLNAENTDVQKLFTDFVGVYDRTFDDSHLSEITVDVASTLTEKISKSRRLENLIKYYPTEKKNTLFGNLIALALGLQPNFKMNFKLSEDAKLQFSKDTYEEDLEELLGKIGDDYADLFTSAKNLYDAILLSGILTVDDNSTKAPLSASMIKRYVEHHEDLEKLKEFIKANKSELYHDIFKDKNKNGYAGYIENGVKQDEFYKYLKNTLSKIDGSDYFLDKIEREDFLRKQRTFDNGSIPHQIHLQEMHAILRRQGDYYPFLKEKQDRIEKILTFRIPYYVGPLVRKDSRFAWAEYRSDEKITPWNFDKVIDKEKSAEKFITRMTLNDLYLPEEKVLPKHSHVYETYAVYNELTKIKYVNEQGKESFFDSNMKQEIFDHVFKENRKVTKEKLLNYLNKEFPEYRIKDLIGLDKENKSFNASLGTYHDLKKILDKAFLDDKVNEEVIEDIIKTLTLFEDKDMIHERLQKYSDIFTANQLKKLERRHYTGWGRLSYKLINGIRNKENNKTILDYLIDDGSANRNFMQLINDDTLPFKQIIQKSQVVGDVDDIEAVVHDLPGSPAIKKGILQSVKIVDELVKVMGDNPDNIVIEMARENQTTNRGRSQSQQRLKKLQSSLKELGSNILNEEKPSYIEDKVENSHLQNDQLFLYYIQNGKDMYTGDELDIDHLSDYDIDHIIPQAFIKDDSIDNRVLTSSAKNRGKSDDVPSLDIVRARKAEWVRLYKSGLISKRKFDNLTKAERGGLTEADKAGFIKRQLVETRQITKHVAQILDARFNTEHDENDKVIRDVKVITLKSNLVSQFRKDFEFYKVREINDYHHAHDAYLNAVVGTALLKKYPKLASEFVYGEYKKYDIRKFITNSSDKATAKYFFYSNLMNFFKTKVKYADGTVFERPIIETNADGEIAWNKQIDFEKVRKVLSYPQVNIVKKVETQTGGFSKESILPKGDSDKLIPRKTKKVYWDTKKYGGFDSPTVAYSVFVVADVEKGKAKKLKTVKELVGISIMERSFFEENPVEFLENKGYHNIREDKLIKLPKYSLFEFEGGRRRLLASASELQKGNEMVLPGYLVELLYHAHRADNFNSTEYLNYVSEHKKEFEKVLSCVEDFANLYVDVEKNLSKIRAVADSMDNFSIEEISNSFINLLTLTALGAPADFNFLGEKIPRKRYTSTKECLTATLIHQSITGLYETRIDLSKLGEE

SEQ ID NO: 271 - protein, 1126 aa, Steptococcus henryi DSM 19005
MTNGLVLGLDIGIASVGVGIIEAETGKVIHASSRIFPAANADNNAERRGFRGGRRLTRRKKHRVKRVRDLFDDYNIATDFSNLNLNPYELRVKGLTEELTNEELFAALRNISKRRGISYLDDAEDDANSGKTDYAKSVLANKELLKTQTPGQIQLDRLNKYGQLRGDFDVVDENGEIHRVINVFSTSDYRKEAEKILQTQSQFNNAINQEFINDYIDILVSKRKYYHGPGNEKSRTDYGRYRTDGRTLENIFDILVGKCTFYPEEYRAAKASYTAQEFNFLNDLNNLTLPTETKKLSIEEKLYLVDYAKNTPVLGPDKLLKEIAKLVDCKKEDIKGFRIDNKEKPDMHTFEVYRTMSKLDKVDIQTLSRETFDELARILTLNTEREGIEEAILKDLPNQFTNEQIEELIKFRKDKSQIFGKGWHNFSVKLMLELIPELYDTSEEQMTILTRLGKTSANKKEVKRTKYINENDVTEEIYNPVVVKSVRQAIKIINASVKEWGEFDNIVIEMPRETNADDERKFIKKMQDANAKEKKDSEERAATLYNGKTELPSNIFHGHNQLATKIRLWYQQGERCIYTGQKIDINDLIHNHNMYEIDHVLPLSLSFDDSLANKVLVLATANQEKGQKTPFQSIPQMKSAWSYREFKSYVLGCKGLSKKKREYLLTEEDINKIEVKQKFIERNLVDTRYASRVVLNTLQDSLKAMNKKTRVSVVRGQFTSQLRRQWKIDKSRETYHHHAIDALIIAASSQLRLWKKQGDTMFEDYKNGQKVDLETGELLSDNEYKELVFQSPYQGFVNTISSKAFEDEILFSYQVDSKVNRKISDATIYATRQAKLTKDKKEETYVLGKIKDIYSQAGYDAFRKRYEKDKSAFLMYQKDPMTWEKVIEVILNDYCEFDDKGKETGNPFEKYRNENGYIRKYSRKGKGTEIKSLKYYDSKLGNHIDITPENSKNSVVLQSINPWRADLYFNPKTLKYELMGLKYSDLSFEKGTGNYSISQDKYDEIKSREGISPKSEFKFTLYKNDLILIKDTINNKTLTARFNSKNDTSKHYVELKPDSKAKYDSEEVLIPVFGKVAKSGRFIKGINKTGISIYKIKTDILGRKHFIKEEGDQPKLEFMKSSKNNK

SEQ ID NO: 272 - protein, 1128 aa, Steptococcus mutans NLML5
MANSKILGLDIGIASVGVGIIDKETGKIIHVNSRIFPAATADSNVERRGFRQGRRLVRRKKHRKVRLADLFLDSNLLTDFSKVSLNLNPYQLRVKGLNEELSNEELFIALKSIVSRRGISYLDDASEDSGANSSEYGKAVEENRKLLEDRTPGQIQLERFEKYGKVRGDFTVVENGENHRLINVFSTSAYKKEAERILRRQQEFNIRIADEFIEAYLTILTGKRKYYHGPGNEKSRTDYGRFRTDGTTLDNIFGILIGKCTFYPDEYRAAKASYTAQEFNLLNDLNNLTVPTETKKLSEEQKRQIIEHAKTVKTLGAPTLLKYIAKLVGCSADDIKGYRIDKSDKPEIHTFEAYRKMRTMELIKVADLSRESLDALAHILTLNTEREGIEEAIRDRFTNKEFNQEQINELVLFRKNNSSLFGKGWHNFSLKLMKELIPELYETSEEQMTILTRLGKQRVKKSSNRTNYIDEKELTEEIYNPVVAKSVRQAIKIINLATKKYGVFDNIVIEMARESNEDDEKKAIQNAQKANEDEKEAALLKAAHQFNGKEELPDSIFHGHKELLTKIRLWHQQGEKCLYTGKTIFINDLIHNPYKYEIDHILPLSLSFDDSLANKVLVLSTANQEKGQRTPFQSLDSMDGAWTYREFKAYVKGLKTLSNKKKDYLLNEEDINKNEVKQKFIERNLVDTRYSSRVVLNTLQDFYKKREFDTKISVVRGQFTSQIRRKWRIEKTRETYHHHAVDALIIAASSQLNLWKKQNNPLISYKEDQFVDPETGEILSLSDDEYKELVFKAPYDHFVDTLKSKKFEDSILFSYQVDSKYNRKISDATIYGTRKARLGKDSQEETYVLGKIKDIYSQKGYEDFIKKYKKDKTQFLMYHKDPQTFEKVIEEILKTYSDKELNEKGKEVPCNPFEKYRQENGPVRKYSKKGNGPEIKSIKYYDNKLGNHIDITPNNSHHQVVLQSLKPWRTDVYFNPKSGKYELMGLKYSDLRFEKVSGDYGISVKKYNEIKSKEGVDENSEFKFTLYKNDLILIKDTESGEQELFRFLSRTMPNQKHYVELKPYDKSKFEGHQKLMDIFGEVAKGGQCLKGLNKSNISIYKVKTDVLGNKYFIKKEGDQPQLNFKKKI

SEQ ID NO: 273 - protein, 1373 aa, Steptococcus oralis SK304
MENKNYSIGLDIGTNSVGWAVITDDYKVPSKKMKVLGNTDKRFIKKNLIGALLFDEGTTAEARRLKRTARRRYTRRKNRLRYLQEIFAEEMSKVDSSFFHRLDDSFLIPEDKKGSKYPIFATLIEEKEYHKQFPTIYHLRKQLADSKEKTDLRLIYLALAHMIKYRGHFLYEDTFDIKNNDIQKIFNEFISIYNNTFEGNSLSGQNVQVEAIFTDKISKSAKRERVLKLFPDEKSTGLFSEFLKLIVGNQADFKKHFDLEEKAPLQFSRDTYDEDLENLLGQIGDDFADLFVAAKKLYDAILLSGILTVTDPSTKAPLSASMIERYENHQKDLATLKQFIKTNLPEKYDEVFSDQSKDGYAGYIDGKTTQESFYKYIKNLLSKFEGADYFLEKIEREDFLRKQRTFDNGSIPHQIHLQEMNAILRRQGEHYPFLKENKEKIEKILTFRIPYYVGPLARGNRDFAWLTRNSDQAIRPWNFEEIVDKASSAESFINKMTNYDLYLPEEKVLPKHSLLYETFAVYNELTKVKFIAEGLRDYQFLDSRQKKDIFYTLFKAEDKRKVTEKDIIQYLHTVDGYDGIELKGIEKQFNASLSTYHDLLKIIKDKEFMDDPNNEEILENIVHTLTIFEDREMIKQRLAQYDSLFDEKVIKALTRRHYTGWGKLSSKLINGIRDKQTGKTILDYLMDDGYNNRNFMQLINDDELSFKEIIKKAQVVGKTDDVKQVVQELPGSPAIKKGILQSIKLVDELVKVMGHEPESIVIEMARENQTTARGKKNSQQRYKRIEDSLKILASGLNAKILKEHPTDNIQLQNDRLFLYYLQNGRDMYTGKPLDINQLSSYDIDHIVPQAFIKDDSLDNRVLTSLKDNRGKSDNVPSLEVVEKMKTFWQQLLDSKLISYRKFNNLTKAERGGLDERDKVGFIKRQLVETRQITKHVAQILDARYNTEVNEKDKKNRTVKIITLKSNLVSNFRKEFRLYKIREINDYHHAHDAYLNAVVAKAILKKYPKLEPEFVYGDYQKYDLKRYISRSKDPKEIEKATEKYFFYSNLLNFFKEEVHYADGTIVKRENIEYSKDTGEIAWNKEKDFATIKKVLSLPQVNIVKKREVQTGGFSKESILPKGNSDKLIPRKTKDILWDTTKYGGFDSPVIAYSILLIADIEKGKAKRLKTVKTLVGITIMEKATFEKSPIAFLENKGYHNVRKENILCLPKYSLFELKNGRRRMLASAKELQKGNEIVLPVHLTTLLYHAKNIHRLDEPEHLEYIQKHRNEFKGLLNLVSEFSQKYVLADANLEKIKNLYADNEQADIEILANSFINLLTFTALGAPAAFKFFGKDVDRKRYTTVSEILNATLIHQSITGLYETRIDLSKLGED

SEQ ID NO: 274 - protein, 1125 aa, Streptococcus anginosus 1_2_62CV
MNGLVLGLDIGIASVGVGILNKETGEIIHANSRIFPAATADSNVERRGFRQGRRLGRRKKHRSARLNNLFEEFGFITDFSAIPLNLNPYALRVKGLSEELTNEELFIALKNIIKRRGISYLDDASEDGETASNEYGKAVEENRKLLADKTPGQIQLERFEKYGQVRGDFTVVENGENHRLINVFSTSAYKKEAERILRRQQEFNVRISDEFIEAYLTILTGKRKYYHGPGNEKSRTDYGRFRTDGTTLDNIFGILIGKCTFYPDEYRAAKASYTAQEFNLLNDLNNLTVPTETKKLSPEQKRQIVEYARTAKTLGTPTLLKYIAKLVDGSIDDIKGYRIDKSDKPEMHTFDAYRKMRTLDLVNIDALSRETLDDLAHILTLNTESEGILEALNSKMPSTFTKEQIDELIQFRKKNSAVFGKGWHNFSLKLMNELISELYETSEEQMTILTRLGKQRSREISKRTKYIDEKELTEEIYNPVVAKSVRQAIKIINEATKRYGIFDNIVIEMARENNEEDAKKDYIKRQKANQDEKNASMEKAAFQYNGKKELPDSIFHGHKELATKIRLWHQQGERCLYTGKNISIRDLIHNPHQYEIDHILPLSLSFDDGLANKVLVLATANQEKGQRTPFQAIDSMDDAWSYREFKQYVRNSKSLSNKKKDYLLTEEDISKIEVKQKFIERNLVDTRYSSRVVLNTLQEFYKTNDFDTKISVVRGQFTSQLRRKWKIEKSRDTYHHHAVDALIIAASSQLRLWKKQNNPLISYKEGQFVDPETGEILSLTDDEYKELVFRPPYDYFVDTLKSKSFEDSILFSYQVDSKYNRKISDATIYGTRKAQLGKDKQEETYVLGKIKDIYSQKGYEDFIKRYNKDETQFLIYHKDPQTFEKVIEEILKTYPDKELNEKGKEIPCNPFEKYRQENGPIRKYSKKGKGPEIKSLKYYDNKLGNHIDITPVNSQNQVVLQSLKPWRTDVYFNPRTSKYELMGLKYSDLRFEKGSGSYGISPEKYNKVKAKEGVNEDSEFKFTLYKNDLILIKDTETGEQQLFRYGSRNDTSKHYVELKPYEKAKFEGNQQLMNLLGTVAKGGQCLKGINKPNLSIYKVKTDVLGNKYFIKKEGDQPQLNFKKKF

SEQ ID NO: 275 - protein, 1396 aa, Streptococcus anginosus DSM 20563
MTKPYSIGLDIGTNSVGWAVITDDYKVPAKKMKVLGNTNRDYIKKNLLGALLFDGGETAEGRRLKRTARRRYTRRKNRLRYLQEIFAEEMMQVDESFFQRLDDSFLVEEDKQGSKYPIFGTLKEEKEYHKKFKTIYHLREELANSKEKADLRLVYLALAHMIKFRGHFLYEGDLKAENTDVQALFKDFVEEYDKTIEESHLSEITVDALSILTEKVSKSSRLENLIAHYPTEKKNTLFGNLIALSLGLQANFKTNFQLSEDAKLQFSKDTYEEDLEGLLGEVGDEYADLFVSAKNLYDAILLSGILTVDDNSTKAPLSASMVKRYKEHKEELAAFKRFIKEKLPKKYEEIFKDDTKNGYAGYVGADKKLRKRSGKLATEEEFYKYVKGILNKVEGADYFLDKIDREDFLRKQRTFDNGSIPHQIHLQEMHAILRRQGEHYPFLKENQDKIEKILTFRIPYYVGPLARKGSRFAWAEYKADEKITPWNFDDILDKEKSAEKFITRMTLNDLYLPEEKVLPKHSPLYETFTVYNELTKVKYVNEQGEAKFFDTNMKQEIFDHVFKENRKVTKDKLLNYLNKEFEEFRIVNLTGLDKENKAFNASLGTYHDLRKILDKSFLDDKVNEKIIEDIIQTLTLFEDREMIRQRLQKYSDIFTTQQLKELERRHYTGWGRLSYKLINGIRNKENKKTILDYLIDDGYANRNFMQLINDDALSFKEEIARAQIIGDVDDIANVVHDLPGSPAIKKGILQSVKIVDELVKVMGHNPTNIIIEMARENQTTDKGRRNSQQRLKLLQDSLKNLDNPVNIKNVENQQLQNDRLFLYYIQNGKDMYTGETLDINNLSQYDIDHIIPQAFIKDNSLDNRVLTRSDKNRGKSDDVPSIEVVHEMKSFWSKLLSVKLITQRKFDNLTKAERGGLTENDKAGFIKRQLVETRQITKHVAQVLDARFNAKHDENKKVIRDVKIITLKSNLVSQFRKDFKFYKVREINDYHHAHDAYLNAVIGTALLKKYPKLASEFVYGEFKKYDVRKFIAKSDKEIGKATAKYFFYSNLMNFFKKEVKFADGTVVERPDIETSEDGEIAWNKQTDFKIVRKVLSYPQVNIVKKTEVQTHGLDRGKPRGLFNANPSPKPKPDSSENLVGIKRNLDPKKYGGYAGISNSYAVLVKAIIEKGVKKKETMVLEFQGISILDRITFEKDKRAFLLGKGYKDIKKIIELPKYSLFELKDGSRRMLASILSTNNKRGEIHKGNELFVPQKFTTLLYHAKRINNPINKDHIEYVKKHRDDFKELLNYVLEFNEKYVGATKNGERLKEAVADFDSKSNEEICTSFLGAVNSKNAGLFELTSLGSASDFEFLGVKIPRYRDYTPSSLLKDSILIHQSITGLYETRIDLSKLGED

SEQ ID NO: 276 - protein, 1155 aa, Streptococcus dysagalactiae subsp equisimilis
MDKKYSIGLDIGTNSVGWAVITDDYKVPSKKFKVLGNTDRHSIKKNLIGALLFDSGETAEATRLKRSARRRYTRRKNRIRYLQEIFSSEMSKVDDSFFHRLEESFLVEEDKKHERHPIFGNIVDEVAYHEKYPTIYHLRKKLADSTDKADLRLIYLALAHMIKFRGHFLIEGDLNPDNSDMDKLFIQLVQTYNQLFEENPINASRVDAKAILSARLSKSRRLENLIAQLPGEKRNGLFGNLIALSLGLTPNFKSNFDLAEDAKLQLSKDTYDDDLDNLLAQIGDQYADLFLAAKNLSDAILLSDILRVNSEITKAPLSASMIKRYDEHHQDLTLLKALVRQQLPEKYKEIFFDQSKNGYAGYIDGGASQEEFYKFIKPILEKMDGTEELLAKLNREDLLRKQRTFDNGSIPHQIHLGELHAILRRQEDFYPFLKDNREKIEKILTFRIPYYVGPLARGNSRFAWMTRKSEETITPWNFEEVVDKGASAQSFIERMTNFDKNLPNEKVLPKHSLLYEYFTVYNELTKVKYVTEGMRKPEFLSGKQKEAIVDLLFKTNRKVTVKQLKEDYFKKIECFDSVEISGVEDRFNASLGTYHDLLKIIKDKDFLDNEENEDILEDIVLTLTLFEDKEMIEERLKTYAHLFDDKVMKQLKRRHYTGWGRLSRKLINGIRDKQSGKTILDFLKSDGFANRNFIQLIHDDSLTFKEAIQKAQVSGQGHSLHEQIANLAGSPAIKKGILQSVKVVDELVKVMGHKPENIVIEMARENQTTQKGQKNSRERMKRIEEGIKELGSQILKEHPVENTQLQNEKLYLYYLQNRRDMYVDQELDINRLSDYDVDHIVPQSFIKDDSIDNKVLTRSDKNRGKSDDVPSEEVVKKMKNYWRQLLNAKLITQRKFDNLTKAERGGLSELDKAGFIKRQLVETRQITKHVAQILDSRMNTKYDENDKLIREVKVITLKSKLVSDFRKDFQFYKVREINNYHHAHDAYLNAVVGTALIKKYPKLESEFVYGDYKVYDVRKMIAKSEQEIGKATAKRFFYSNIMNFFKTEITLANGEIRKRPLIETNEETGEIVWDKGRDFATVRKVLSMPQVNIVKKTEVQTGALTNESIYARGSFDKLISRKHRFESSKYGGFGSPTVTYSVLVVAKYQSYKMEK

SEQ ID NO: 277 - protein, 1348 aa, Streptococcus equi subsp zooepidemicus
MKKPYTIALDIGTNSVGWVVVTDDYRVPTKKMKVLGNTERKTIKKNLIGALLFDSGDTAEGTRLKRTARRRYTRRKNRLRYLKEIFTEEMAKVDDGFFQRLEDSFYVLEDKEGNKHPIFANLADEVAYHKKYPTIYHLRKELVDNPQKADLRLIYLAVAHIIKFRGHFLIEGTLSSKNNNLQKSFDHLVDTYNLLFEEQRLLTEGINAKELLSAALSKSKRLENLISLIPGQKKTGIFGNIIALSLGLTPNFKANFGLSKDVKLQLAKDTYADDLDSLLAQIGDQYADLFLAAKNLSDAILLSDILTESDEITRAPLSASMVKRYREHHKDLVTLKTLIKDQLPEKYQEIFLDKTKNGYAGYIEGQVSQEEFYKYLKPILARLDGSEPLLLKIDREDFLRKQRTFDNGSIPHQIHLEELHAILRRQEVFYPFLKDNRKKIESLLTFRIPYYVGPLARGHSRFAWVKRKFDGAIRPWNFEEIVDEEASAQIFIEKMTKNDLYLPNEKVLPKHSLLYETFTVYNELTKVKYATEGMTRPQFLSADQKQAIVDLLFKTNRKVTVKQLKENYFKKIECWDSVEITGVEDSFNASLGTYHDLLKIIQDKDFLDNPDNQKIIEDIILTLTLFEDKKMISKRLDQYAHLFDKVVLNKLERHHYTGWGRLSGKLINGIRDKQSGKTILDFLKADGFANRNFMQLIHDSELSFIDEIAKAQVIGKTEYSKDLVGNLASSPAIKKGISQTIKIVDELVKIMGYLPQQIVIEMARENQTTAQGIKNARQRMRKLEETAKKLGSNILKEHPVDNSQLQNDKRYLYYLQNGKDMYTGDDLDIDYLSSYDIDHIIPQSFIKNNSIDNKVLTSQGANRGKLDNVPSEAIVRKMKGYWQSLLRAGAISKQKFDNLTKAERGGLTQVDKAGFIQRQLVETRQITKHVAQILDSRFNTEFDDHNKRIRKVHIITLKSKLVSDFRKEFGLYKIRDINHYHHAHDAYLNAVVAKAILGKYPQLAPEFVYGDYPKYNSFKERQKATQKTLFYSNILKFFKDQESLHVNSDGEEIWNANKHLPIIKNVLSIPQVNIVKKTEVQTGGFYKESILSKGNSDKLIPRKNNWDTRKYGGFDSPTVAYSVLVIAKMEKGKAKVLKPVKEMVGITIMERIAFEENPVVFLEAKGYREIQEHLIIKLPKYSLFELENGRRRLLASASELQKGNELFLPVDYMTFLYLAAHYHELTGSSEDVLRKKYFVERHLHYFDDIIQMINDFAERHILASSNLEKINHTYHNNSDLPINERAENIINVFTFVALGAPAAFKFFDATIDRKRYTSTKEVLNATLIHQSVTGLYETRIDLSQLGEN

SEQ ID NO: 278 - protein, 1136 aa, Streptococcus gordonii Challis substr CH1
MNGLVLGLDIGIASVGVGILEKDTGKIIHASSRLFPAATADNNVERRSNRQGRRLNRRKKHRSVRLQDLFEGYGLLTDFSKVSMNLNPYQLRVQGMENQLTNEELFVALKNIVKRRGISYLDDASEDGGTVSSDYGKAVEENRKLLAEKTPGQIQLERFEKYGQLRGDFTVEENGEKHRLINVFSTSAYRKEAERILRKQQEFNSKITDEFIEDYLIILTGKRKYYHGPGNEKSRTDYGRFRTDGTTLDNIFGILIGKCTFYTEEYRASKASYTAQEFNLLNDLNNLTVPTETKKLSEEQKKLIIEYAKSAKTLGASTLLKYIAKMIDASVDQIRGYRVDVNNKPEMHTFEVYRKMQSLETIKVEELPRKVLDELAHILTLNTEREGIEEAINSKLKDIFNRDQVLELVQFRKNNSSLFSKGWHNFSIKLMMELIPELYETSEEQMTILTRLGKQRSKETSKRTKYIDEKELTEEIYNPVVAKSVRQAIKIINEATKKYGIFDNIVIEMARENNEEDAKKDYIKRQKANQDEKNAAMEKAAFQYNGKKELPDNIFHGHKELTTKIRLWHQQGEKCLYTGKNIPISDLIHNQYKYEIDHILPLSLSFDDSLSNKVLVLATANQEKGQRTPFQALDSMDDAWSYREFKSYVKDSKLLSNKKKDYLLTEEDISKIEVKQKFIERNLVDTRYSSRVVLNALQDFYKSHQLDTTISVVRGQFTSQLRRKWGIEKSRETYHHHAVDALIIAASSQLRLWKKHSNPLIAYKEGQFVDSETGEIVSLSDEEYKELVFKAPYDHFVDTLRSKKFEDSILFSYQVDSKYNRKISDATIYATRKAKLDKEKKEYTYTLGKIKDIYALGTKTPSKTGFYKFLDLYKTDKSQFLMYQKDRKTWDEVIEKIIEQYRPFKEYDKNGKEVDFNPFEKYRIGNGPIRKYSKKGNGPEIKSLKYYDILLGKHKNITPDGSRNTVALLSLNPWRTDVYYNSETKKYEFLGLKYADLCFEEGGAYGISEVKYKKIREKEGIGKNSEFKFTLYKNDLILIKDTETNCQQFFRFWSRTGKDNPKSFEKHKIELKPYEKAKFEKGEELKVLGKVPPSSNQFQKNMQIENLSIYKVKTDILGNKHFIKKEGDEPKLKFKK

SEQ ID NO: 279 - protein, 1129 aa, Streptococcus infantarius subsp infantarius
MSNGKILGLDIGVASVGVGIIDSKTGNVIHANSRLFSAANAENNAERRGFRGARRLTRRKKHRVKRVRDLFEKYDISTDFRNLNLNPYELRVKGLTEQLTNEELFAALRTIAKRRGISYLDDAEDDSTGSSDYAKSIDENRRLLKTKTPGQIQLERLEKYGQLRGNFTVYDENGEAHRLINVFSTSDYKNEARKILETQSNYNKQITDEFIEDYIEILTQKRKYYHGPGNEKSRTDYGRFRTDGTTLENIFGILIGKCSFYPEEYRASKASYTAQEFNFLNDLNNLKVPTETGKLSTEQKEYLVDFAKKSKALGASKLLKEIAKIVDCSVDDIKGYRVDNKDKPDLHTFEPYRKLKFNLSSIDIDELSRETLDKLADILTLNTEREGIEDAIKRNLPSQFTEEQISEIVQIRKNQSSAFNKGWHSFSAKLMNELIPELYVTSEEQMTILTRLEKFKVNKKSSKNTKTIDEKEITDEIYNPVVAKSVRQTIKIINAAVKKYGDFDKIVIEMPRDKNAEDEKKFIDKKQKENKKEKDDSLKRAAFLYNGTDNLPDGVFHGNKELKTKIRLWYQQGERCLYSGKLISIHDLVHNSNKFEIDHILPLSLSFDDSLANKVLVYAWTNQEKGQKTPYQVIDSMDTAWSFREMKDYVLKQKGLGKKKCEYLLTTENIDKIEVKKKFIERNLVDTRYASRVVLNSLQTALKELGKDTKVSVVRGQFTSQLRRKWNIDKSRETYHHHAVDALIIAASSQLKLWQKQENPMFESYGENQVVNKETGEILSISDDKYKELVFQPPYQGFVNTISSKGFEDEILFSYQVDSKFNRKVSDATIYSTRKAKLGKDKKDETYVLGKIKDIYSQDGFDTFIKRYKKDKTQFLMYQKDPLTWENVIEVILRDYPSEKLSEDGKKTVKCNPFEEYRRENGLICKYSKKGNGTPIKSLKYYDKKLGNCIDITPEKSKNRVVLRQISPWRADIYFNLETLKYELMGLKYSDLSFEKGTGKYHISQEKYDAIREKEGIGKKSEFKFTLYRNDLILIKDTLNNCERMLRFGSKNDTSKHYVELKPLEKGTFDSEEEILPVLGKVAKSGQFIKGLNKPNISIYKVRTDVLGNKFFIKKEGDKPKLDFKNNNK

SEQ ID NO: 280 - protein, 1125 aa, Streptococcus intermedius B196
MNGLVLGLDIGIASVGVGILNKETGEIIHVNSRIFPAATADSNVERRGFRQGRRLGRRKKHRSARLNDLFEEFGFITDFSAVPLNLNPYALRVKGLSEELTNEELFIALKNIIKRRGISYLDDASEDGETASNEYGKAVEENRKLLADKTPGQIQLERFEKYGQVRGDFTVVENGENHRLINVFSTSAYKKEAERILRRQQEFNVRISDEFIEAYLTILTGKRKYYHGPGNEKSRTDYGRFRTDGTTLDNIFGILIGKCTFYPDEYRAAKASYTAQEFNLLNDLNNLTVPTETKKLRPEQKRQIVEYARTAKTLGTPTLLKYIAKLVDGSIDDIKGYRIDKSDKPEMHTFDAYRKMRTLELVDVDILSRETLDDLAYILTLNTESEGILEALNSKMPGTFTKEQIDELIQFRKKNSAVFGKGWHNFSLKLMNELIPELYETSEEQMTILTRLGKQRSREISKRTKYIDEKELTDEIYNPVVAKSVRQAIKIINLATKKYGIFDNIVIEMARESNEDDEKKAIQNVQKANEDEKKAAMEKAADLYNGKKELPDSIFHGHKELATKIRLWHQQGERCLYTGKNISIHDLIHNPHQYEIDHILPLSLSFDDGLANKVLVLATANQEKGQRTPFQALDSMDDAWSYIEFKQYVRNSKSLSNKKKDYLLTEEDISKIEVKQKFIERNLVDTRYSSRVVLNTLQEFYKTNDFDTKISVVRGQFTSQLRRKWKIEKSRDTYHHHAVDALIIAASSQLRLWKKQNNPLISYREGQLVDPETGEILSLTDDEYKELVLRPPYDYFVDTLKSKSFEDSILFSYQVDSKYNRKISDATIYGTRKAQLGKDKQEETYVLGKIKDIYSQKGYEDFIKRYKKDTTQFLMYHKDPQTFAKVIEEILKTYPDKELNEKGKEIPCNPFEKYRQENGPIRKYSKKGKGPEIKSLKYYDNKLGNHIDITPVNSQNQVVLQSLKPWRTDVYFNPQTSKYELMGLKYSDLRFEKGSGSYGISPEKYNKVKAKEGVDEDSEFKFTLYKNDLILIKDTETGEQQLFRYGSRNDTSKHYVELKPYEKAKFEGNQQLMNLLGTVAKGGQCLKGINKPNLSIYKVKTDVLGNKYFIKKEGDQPQLNFKKKI

SEQ ID NO: 281 - protein, 1373 aa, Streptococcus lutetiensis 033
MEKTYSIGLDIGTNSVGWSVITDDYKVPAKKMKVLGNTDKKYIKKNLLGALLFDSGETAEVTRLKRTARRRYTRRKNRLRYLQEIFAKEMAKVDESFFQRLEESFLTDDDKTFDSHPIFGNKAEEDAYHQEFPTIYHLRKHLADSSEKADLRLVYLALAHMIKFRGHFLIEGELNAENTDIQKLFNDFVETYDKIADESHLSEVDASSILTNKISKSRRLENLIKQYPTEKKNTLFGNLVALVLGLQPNFKTNFKLSEDAKLQFSKDTYDEDLEELLGKIGDDYADLFTAAKNLYDAILLSGILTVDDNSTKAPLSASMIKRYEEHHEDLEKLKKFIKVNNFDKYHEIFKDKSKNGYAGYIENGVKQDIFYKHLKSIISEKNGGQYFLDKIEREDFLRKQRTFDNGSIPHQIHLQEMRAILRRQGEYYPFLKENQAKIEKILTFRIPYYVGPLARKDSRFAWANYHSDEPITPWNFDEVVDKEKSAEKFITRMTLNDLYLPEEKVLPKHSHVYETFTVYNELTKIKYVNEQGESFFFDANMKQEIFDHVFKENRKVTKAKLLSYLNNEFEEFRINDLIGLDKDSKSFNASLGTYHDLKKILDKSFLDDKTNEQIIEDIVLTLTLFEDRDMIHERLQKYSDFFTSQQLKKLERRHYTGWGRLSYKLINGIRNKENNKTILDFLIDDGHANRNFMQLINDESLSFKTIIQEAQVVGDVDDIEAVVHDLPGSPAIKKGILQSVKIVDELVKVMGDNPDNIVIEMARENQTTNRERSQSQQRLKKLQNSLKELGSNILNEEKPSYIEDKVENSHLQNDQLFLYYIQNGKDMYTGDELDIDHLSDYDIDHIIPQAFIKDNSIDNRVLTSSAKNRGKSDDVPSLDIVRARKAEWVRLYKSGLISKRKFDNLTKAERGGLTEADKAGFIKRQLVETRQITKHVAQILDARFNTKRDENDKVIRDVKVITLKSNLVSQFRKEFKFYKVREINDYHHAHDAYLNAVVGTALLKKYPKLTPEFVYGEYKKYDVRKLIAKSSDDYSEMGKATAKYFFYSNLMNFFKTEVKYADGRVFERPDIETNADGEVVWNKQKDFDIVRKVLSYPQVNIVKKVEEQTVGQNGGLFDNNILAKPEKDDKKKLFPIKKSLSTTSYGGYARATIAYSILIVSEFGKNKELKLLGLPLLDKVKYEKNPIAYLNSIGIINVKSIFKLPKYCLFEFQEKNTNYRRYMVSNQELKRANQLFLTCKETELVYKYIKSDNDNTHLVGNEKTILSIWNKLVIFMERTKLIDKKLFASLKQLKDEVDLINILDMTAKSLDFTKISAGQKKITISDSLSLPIKRWQFSSDEKMLKQLKTATLIHQSVTGLYETRIDLSKLGEE

SEQ ID NO: 282 - protein, 1392 aa, Streptococcus mitis SK321
MNNNNYSIGLDIGTNSVGWAVITDDYKVPSKKMKVLGNTDKHFIKKNLIGALLFDEGATAEDRRFKRTARRRYTRRKNRLRYLQEIFSEEMSKVDSSFFHRLDDSFLVPEDKRGSKYPIFATLAEEKEYHKKFPTIYHLRKHLADSKEKTDLRLIYLALAHMIKYRGHFLYEESFDIKNNDIQKIFSEFISIYDNTFEGSSLSGQNAQVEAIFTDKISKSAKRERILKLFAYEKSTDLFSEFLKLIVGNQADFKKHFDLEEKAPLQFSKDTYDEDLENLLGQIGDDFADLFLVAKKLYDAILLSGILTVTDSSTKAPLSASMIERYENHQKDLAALKQFIQNNLQEKYDEVFSDQSKDGYARYINGKTTQEAFYKYIKNLLSKFEGSDYFLDKIEREDFLRKQRTFDNGSIPHQIHLQEMNAIIRRQGEHYPFLKEYKEKIETILTFRIPYYVGPLARGNRNFAWLTRNSDQAIRPWNFEEIVDQASSAEEFINKMTNYDLYLPEEKVLPKHSLLYETFAVYNELTKVKFISEGLRDYQFLDSGQKKQIVNQLFKEKRKVTEKDIIQYLHNVDGYDGIELKGIEKQFNASLSTYHDLLKIIKDKEFMDDPKNEEILENIVHTLTIFEDREMIKQRLAQYASIFDKKVIKALTRRHYTGWGKLSAKLINGICDKKTGKTILDYLIDDGYSNRNFMQLINDDGLSFKDIIQKAQVVGKTNDVKQVVQELPGSPAIKKGILQSIKLVDELVKVMGHAPESIVIEIARENQTTARGKKNSQQRYKRIEDALKNLAPGLDSNILKEHPTDNIQLQNDRLFLYYLQNGKDMYTGEALDINQLSSYDIDHIVPQAFIKDDSLDNRVLTSSKDNRGKSDNVPSLEVVQKRKAFWQQLLDSKLISEHKFNNLTKAERGGLDERDKVGFIRRQLVETRQITKHVAQILDARFNTEVNEKDKKNRTVKIITLKSNLVSNFRKEFKLYKVREINDYHHAHDAYLNAVVAKAILKKYPKLEPGFVYGDYQKYDIKRYISRSKDPKEVEKATEKYFFYSNLLNFFKEEVHYADGTIVKRENIEYSKDTGEIAWNKEKDFATIKKVLSLPQVNIVKKTEIQTHGLDRGKPRGLFNSNPSPKPSEDRKENLVPIKQGLDPRKYGGYAGISNSYAVLVKAIIEKGAKKQQKTVLEFQGISILDKINFEKNKENYLLEKGYIKILSTITLPKYSLFEFPDGTRRRLASILSTNNKRGEIHKGNELVIPEKYTTLLYHAKNINKTLEPEHLEYVEKHRNDFAKLLEYVLNFNDKYVGALKNGERIRQAFIDWETVDIEKLCFSFIGPRNSKNAGLFELTSQGSASDFEFLGVKIPRYRDYTPSSLLNATLIHQSITGLYETRIDLSKLGED

SEQ ID NO: 283 - protein, 1345 aa, Streptococcus mutans TA 159
MKKPYSIGLDIGTNSVGWAVVTDDYKVPAKKMKVLGNTDKSHIEKNLLGALLFDSGNTAEDRRLKRTARRRYTRRRNRILYLQEIFSEEMGKVDDSFFHRLEDSFLVTEDKRGERHPIFGNLEEEVKYHENFPTIYHLRQYLADNPEKVDLRLVYLALAHIIKFRGHFLIEGKFDTRNNDVQRLFQEFLAVYDNTFENSSLQEQNVQVEEILTDKISKSAKKDRVLKLFPNEKSNGRFAEFLKLIVGNQADFKKHFELEEKAPLQFSKDTYEEELEVLLAQIGDNYAELFLSAKKLYDSILLSGILTVTDVGTKAPLSASMIQRYNEHQMDLAQLKQFIRQKLSDKYNEVFSDVSKDGYAGYIDGKTNQEAFYKYLKGLLNKIEGSGYFLDKIEREDFLRKQRTFDNGSIPHQIHLQEMRAIIRRQAEFYPFLADNQDRIEKLLTFRIPYYVGPLARGKSDFAWLSRKSADKITPWNFDEIVDKESSAEAFINRMTNYDLYLPNQKVLPKHSLLYEKFTVYNELTKVKYKTEQGKTAFFDANMKQEIFDGVFKVYRKVTKDKLMDFLEKEFDEFRIVDLTGLDKENKVFNASYGTYHDLCKILDKDFLDNSKNEKILEDIVLTLTLFEDREMIRKRLENYSDLLTKEQVKKLERRHYTGWGRLSAELIHGIRNKESRKTILDYLIDDGNSNRNFMQLINDDALSFKEEIAKAQVIGETDNLNQVVSDIAGSPAIKKGILQSLKIVDELVKIMGHQPENIVVEMARENQFTNQGRRNSQQRLKGLTDSIKEFGSQILKEHPVENSQLQNDRLFLYYLQNGRDMYTGEELDIDYLSQYDIDHIIPQAFIKDNSIDNRVLTSSKENRGKSDDVPSKDVVRKMKSYWSKLLSAKLITQRKFDNLTKAERGGLTDDDKAGFIKRQLVETRQITKHVARILDERFNTETDENNKKIRQVKIVTLKSNLVSNFRKEFELYKVREINDYHHAHDAYLNAVIGKALLGVYPQLEPEFVYGDYPHFHGHKENKATAKKFFYSNIMNFFKKDDVRTDKNGEIIWKKDEHISNIKKVLSYPQVNIVKKVEEQTGGFSKESILPKGNSDKLIPRKTKKFYWDTKKYGGFDSPIVAYSILVIADIEKGKSKKLKTVKALVGVTIMEKMTFERDPVAFLERKGYRNVQEENIIKLPKYSLFKLENGRKRLLASARELQKGNEIVLPNHLGTLLYHAKNIHKVDEPKHLDYVDKHKDEFKELLDVVSNFSKKYTLAEGNLEKIKELYAQNNGEDLKELASSFINLLTFTAIGAPATFKFFDKNIDRKRYTSTTEILNATLIHQSITGLYETRIDLNKLGGD

SEQ ID NO: 284 - protein, 1129 aa, Streptococcus orisratti DSM 15617
MTNGKILGLDIGIASVGVGVIEADTGKVVHASSRLFPSANADNNAERRGFRGGRRLIRRKKHRMKRVKDLFEEYKLETRFNNLNLNPYELRVRGLTEKLAPEELFAALKNLSKHRGISYLDDAEDDNASAKTNYAKSVLANKELLKTRTPGQIQWERFEKYGQIRGDFDIVTPEGEQQRIINVFSTTDYKKEAEQILETQALYYPQISSEFIEDFITILTSKRKYYHGPGNEKSRTDYGRYRTDGTTLDNIFDILVGKCGIYPDEYRAAKASYTAQEFNFLNDLNNLTLPTETKRLSTDQKKDLVRFATTAATLGPDKLLKEIARMVGCSKDDIKGYRIDNKEKPDLHTFEAYRAMTKLNTFDVATFSREMIDELARILTLNTDREGIEEAIVNDFPNLFSREQIDELIQFRKSKSQLFGKGWHSFSLKLMSELIPELYATSEEQMTILTRLNKMSPERKVTLRTKYINEQDATEEIYNPVVAKSVRQAIKIINECIKKWGEFDQIVIEMPRDKNEDDEKKRIADGQKANAKEKASATEFAASLYNGKKELPDEVFHGHKQLATKIRLWYQQDGKCLYTGQDISIHDLIHNQNQYEIDHIMPLSLSFDDSLSNKVLVLATANQEKGQQTPYQAIPKMKSAWSYREFKAFVLDCKRLSKKKREYLLTEEDIDKIEVRRKFIARNLVDTRYASRVVLTTLQDALEVMNKETKVSVVRGQFTSQLRRQWKIDKTRDTYHHHAIDALIIAASSQLKLWKKQDNPMFEEYEQGQKINLETGEILSDDDYKKLVFQSPYQGFVHTISSKSFEDEILFSYQIDSKVNRKISDATIYATRQAQLSRDRKKETYVLGKIKDIYSQTGYDAFRKRYDKDKTVFLMYQKDPLTWEKVIEVILRDYKEFDDKGKEVGNPFERYRQQNGLMTKYSRKNKGTPIKALKYYDNKLGNHVDVTPDDSKNPVVLQSINPWRADLYFNPKTAKYELLGLKYADLSFEKGTGNYTISQEKYDEIKKREGISAESEFKFTLYKNDLLLIKDIENGEEQVFRFLSRTMPNQKHYVELKPYDKAKFDGGQSLLTVLGTVAKGGQCLKSLNKVGISIYKVKTDVLGYQHFIKKEGNQPKLSFENSIKRHKNK

SEQ ID NO: 285 - protein, 1140 aa, Streptococcus parasanguinis F0449
MNGLVLGLDIGIASVGVGILKKDIGEIIHTNSRLFSAATADSNIERRGHRGGKRLTRRKKHRSIRLHDLFEDFGLLTDFSKVSINLNPYQLRVQGLDNQLTNEELFIALKNIVKRRGISYLDDASEDGGTVSSDYGKAVEENRKLLAEQTPGQIQLDRFEKYGQVRGDFNVVENGEKRRLINVFTTSAYSKEAERILRKQQEFNKKITDEFIEDYLTILTGKRKYYHGPGNEKSRTDYGRYTTKKDPEGKYITLDNIFGILIGKCTFYPDEYRASKASYTAQEFNLLNDLNNLTVPTETKKLSEEQKKTIIKYAKTAKTLGASTLLKYIAKLIGASVDQIHGYRIDPNKKPEMHTFETYRKMQSLETISVEELPRKVLDELAHILTLNTEREGIEEAINATLKDTFSQDQVLELVQFRKNNSSLFSKGWHSFSLKLMMELIPELYETSEEQMTILTRLGKQKSKETSKRTKYIDEKELTEEIYNPVVAKSVRQAIKIINEATKKYGIFDNIVIEMARENNEEDAKKEYIKRQKANLDEKNAAMEKAAFQYNGKKELPDNVFHGHKELATKIRLWHQQGEKCLYTGKNIPISDLIQNQYKYEIDHILPLSLSFDDSLSNKVLVLATANQEKGQRTPFQALDSMDDAWSYREFKSYVKDSKLLGNKKKEYLLTEEDISKIEVKQKFIERNLVDTRYSSRVVLNALQDFYKEHQFDTTISVVRGQFTSQLRRKWGLEKSRETYHHHAVDALIIAASSQLRLWKKQNNPLISYTEGQFVDQVTGEIISLSDDEYKELVFKAPYDHFVDTLKSKKFEDSILFSYQVDSKYNRKISDATIYATRKAKLDKENKEYTYTLGKIKDIYALGTKSPSKTGFYKFLDLYNKDKSQFLMFQKDRKTWDEVIEKIIEQYRPFKEYDENGKEVDFNPFEKYRIENGPIRKYSKKGNGPEIKSLKYYDNLLGKFVDITPSESKNPVALLSLNPWRTDVYYNTETSKYEFLGLKYADLCFEKGGAYGISEVKYNKIREKEGIGKESEFKFTLYKNDLILIKDTETNCQQIFRFWSRTGKDNPKSFEKHKIELKPYEKARFEKGEELEVLGKVPPSSNQLQKNMQIENLSIYKVKTDVLGNKHFIKKEGEEPKLKF

SEQ ID NO: 286 - protein, 1385 aa, Streptococcus salivarius K12
MTKPYSIGLDIGTNSVGWAVITDDYKVPSKKMKVLGNTSKKYIKKNLLGALLFDSGITAEGRRLKRTARRRYTRRRNRILYLQEIFSTEMATLDDAFFQRLDDSFLVPDDKRDSKYPIFGNLVEEKVYHDEFPTIYHLRKHLADSSKKADLRLVYLALAHMIKYRGHFLIEGDFNSKNNDLQKNFQDFLDTYNAIFESDLSLENSKQLEEIVKDKISKSAKKDRILKLFPGEKNSGIFSEFLKLIVGNQADFRKYFNLDEKTSLQFSKESYDEDLETLLGHIGDDYSDVFLKAKKLYDAILLSGILTVTDNGTEAPLSSAMIMRYKEHEEDLALLKAYIRNISLETYNEVFKDNTKNGYAGYIDGKTSQEDFYVYLKRLLAGLEGADYFLEKIDREDFLRKQRTFDNGSIPYQIYLQEMRAILDKQAKFYPFLAKNKERIEKILTFRIPYYVGPLARGNSDFAWSIRKRNEKITPWNFEDVIDKESSAEAFINRMTSFDLYLPEEKVLPKHSLLYENFTVYNELTKVRFIAEGMRDYQFLDSKQKKDIVRLYFKGKRKVTDKDIIEYLHAIDGYDGIELKGIEKQFNSSLSTYHDLLNIINDKEFLDDSSNETIIEEIIHTLTMFEDREMIKQRLSKFDNIFDKSVLKKLSRRHYTGWGKLSAKLINGIRDEKSGNTILDYLIDDGVSNRNFMQLIHDDALSFKKKIKKAQIIGDKDNIKQVVKSLPGSPAIKKGILQSIKIVDELVKVMGREPESIVVEMARENQYTNQGKSNSQQRLKRLEESLKGLGSKILKENVPTRLSKIDNNALQNDRLYLYYLQNGKDMYTGEELDIDRLSNYDIDHIIPQAFLKDDSIDNKVLVSSASNRGKSDDVPSLEVVKKRKTLWYQLLKSKLISQRKFDNLTKAERGGLSQEEKAGFIQRQLVETRQITKHVARLLDERFNNKKDENNRTLRTVKIITLKSSLVSQFRKDFELYKVREINDFHHAHDAYLNAVVASALLKKYPKLEPEFVYGDYPKYNSFRERKSATEKVYFYSNIMNIFKKSIPLADGTVIDRPLIEVNEETGESVWNKVADLNTVRKVLSYSQVNIVKKVEEQNHGLDRGKPKGLFNANLSSKPKPNSKENLVGAKEYLDPKKYGGYAGISNSFAILVKGTIEKGAKKKITNVLEFQGISILDRIYYRKDKLNFLLEKGYKDIELIIELPKYSLFELSDGSRRMLASILSTNNKRGEIHKGNQIFISQKFVKLLYHAKRISSTFNENHRKYVENHKKEFEELFYYILEFNENYVGAKKNGELLKSAFQSWQNHSIDELCSSFIGPTGSERKGLFELTSRGGAADFEFLGVKIPRYRDYTPSSLLKDATLIHQSVTGLYETRIDLGKLGED

SEQ ID NO: 287 - protein, 1392 aa, Streptococcus sanguinis SK330
MENKNYSIGLDIGTNSVGWAVITDDYKVPSKKMKVFGNTDKHFIKKNLIGALLFDEGATAEDRRLKRTARRRYTRRKNRLRYLQEIFSEEISKLDSSFFHRLDDSFLVPKDKRGSKYPIFATLEEEKEYHKKFPTIYHLRKHLADSKEKTDLRLIYLALAHMIKYRGHFLYEESFDIKNNDIQKIFNEFISIYDNTFEGSSLSGQNAQVEAIFTDKISKSAKRERVLKLFSDEKSTSLFSEFLKLIVGNQADFKKHFDLEEKAPLQFSKDTYDEDLENLLGQIGDGFTDLFLVAKKLYDAILLSGILTVTDPSTKAPLSASMIERYESHQKDLAALKQFIKNNLPKRYNEVFSDQSKDGYAGYIDGKTTQEAFYKYIKNLLSKFEGADYFLDKIEREDFLRKQRTFDNGSIPHQIHLQEMNAILRRQGEHYPFLKENREKIEKILTFRIPYYVGPLARGNRDFAWLTRNSDQAIRPWNFEEIVDKASSAEEFINKMTNYDLYLPEEKVLPKHSLLYETFAVYNELTKVKFIAEGLRDYQFLDSGQKKQIVNQLFKEKRKVTEKDIIHYLHNVDGYDGIELKGIEKQFNASLSTYHDLLKIIKDKEFMDDPKNEEILENIVHTLTIFEDREMIKQRLAQYDSIFDEKVIKALTRRHYTGWGKLSAKLINGICDKQTGDTILDYLIDDGKINRNFMQLINDDGLSFKEIIQKAQVVGKTDDVKQVVQELPGSPAIKKGILQSIKIVDELVKVMGYAPESIVIEMARENQTTARGKKNSQQRYKRIEDSLKNLAPGLDSNILKENPTDNIQLQNDRLFLYYLQNGKDMYTGKPLDIDQLSSYDIDHIIPQAFIKDDSIDNRVLTSSKDNRGKSDNVPSLEVVQKRKAFWQQLLDSKLISERKFNNLTKAERGGLDERDKVGFIRRQLVETRQITKHVAQILDASFNTEVNEKNQKIRTVKIITLKSNLVSNFRKEFELYKVREINDYHHAHDAYLNAVVAKAILKKYPKLEPEFVYGDYQKYDLKRYISRFKPSKEIEKATEKYFFYSNLLNFFKEEVHYADGIIVKRENIEYSKDTGEIAWNKEKDFATIKKVLSYPQVNIVKKTEIQTHGLDRGKPKGLFNSNPSPKPSEDSKENLVPIKQGLDPRKYGGYAGISNSYAVLVKAIVEKGAKKQQKTILEFQGISILDKINFENNKENYLLKKRYIEILSTITLPKYSLFEFPDGTRRRLASILSTNNKRGEIHKGNELVLPGKYTTLLYHAKNINKKLEPEHLEYVEKHRNDFAKLLECVLNFNDKYVGALKNGERIRQAFTDWETVDIEKLCFSFIGPENSKNAGLFELTSQGSASDFEFLGVKIPRYRDYAPSSLLKATLIHQSITGLYETRIDLSKLGED

SEQ ID NO: 288 - protein, 1128 aa, Streptococcus vestibularis ATCC 49124
MSDLVLGLDIGIGSVGVGILNKVTGEIIHKNSRIFPAAQAENNVERRTNRQGRRLTRRKKHRRVRLNHLFEESGLITDFTKVSINLNPYQLRVKGLIDELSNEELFIALKNMVKHRGISYLDDASDDGNSSVGDYAQIVKENSKQLETKTPGQIQLERYQKYGQLRGDFTVEEDGKKHRLINVFPTSAYRSEALRILQTQKEFNPQITDEFINRYLEILTGKRKYYHGPGNEKSRTDYGRYTTKKDSENEYITLDNIFGILIGKCTFYPEEYRAAKASYTAQEFNLLNDLNNLTVPTETKKLSEEQKNQIINYVKNEKAMGPAKLFKYIAKLLSCDVADIKGYRIDKSDKAEIHTFEAYRKMKTLETIDFEKMSRDQLDKLAYVLTLNTEREGIQEALDHEFADGNFSQEQIDELVQFRKANSSIFGKGWHNFSVKLMMELIPELYATSEEQMTILTRLGKQKTTSSSNKTKYIDEKLLTEEIYNPVVAKSVRQAIKIVNAAIKEYGDFDNIVIEMARETNEDDEKKAIQKIQKANKDEKDAAMLKAANQYNGRAELPHSVFHGHKQLATKIRLWHQQGERCLYTGKTISIHDLINNPNQFEIDHILPLSITFDDSLANKVLVYATANQEKGQRTPYQALDSMDDAWSFRELKAFVRESKSLSNKKKEYLLTEEDISRFDVRKKFIERNLVDTRYASRVVLNALQEHFRAHKTDTKVSVVRGQFTSQLRRHWGIEKTRDTYHHHAVDALIIAASSQLNLWKKQKNTLVNYSENQLLDIETGELISDDEYKESVFKAPYQHFVDTLKSKEFEDSILFSYQVDSKFNRKISDATIYATRQAKVGKDKKDETYVLGKIKDIYSQTGYDAFIKIYQKDKSKFLMYRHDPQTFEKVIEPILENYPNKEMNEKGKEVPCNPFLKYKEEHGDYIRKYSKKGNGPEIKSLKYYDSKLGNHIDITPKDSNNKVVLQSVSPWRADVYFNKTTGKYEILGLKYADLQFEKGTGTYKISQEKYNVIKKKEGVDSDSEFKFTLYKNDLLLIKDTETKEQQLFRFLSRTKPNVKHYVELKPYDKQKFEGNESLINVLGAVAKGGQCQKGINKPNISIYKVRTDVLGNQHIIKNEGDKPKLDF

SEQ ID NO: 289 - protein, 1366 aa, Lactobacillus composti DSM 18527
MTKDYSLGLDIGTGSVGFAALDTNYRLLRAKGNNVIGVRLFTPAETAEERRGFRTARRRLSRRRWRLGALNGIFAPELAKVDPNFLHRLKYAWVHPADQQNKGKYSAAPLFNDAALDRQFHDDYPTIYHLRLKLMTDTSQHDLREVYLAIHHIIKFRGNFLRGEGPINASEAFDINTFIDQMTAFYDQAFPDFKIVDQVDQQIIFKGLTDMTLSPADRANKALMGFNNAAQQPNKRIFKAILSGLVGNQVDLMAIFQLDGIPKEDQKEFKFKFVDNDIEEKLAALGDNPALSDEQNEFLTTLYAAFSGLTLKGLLGDATSISAAMVARYASHRTDWTYIKDHVLTPQNNRELRLAYADLMTDNEDVRLKAGKKFAKAIEAADIPAAKKSEFSLKIDNNEFLPRQRTKANGTIPHQLHLNELQQIIENQGQYYPFLKATFEQDGHTLNKIEGLVKFRVPYYVGPLVPKHKVAGNNANHWMVPKEPGAITPWNYTEKVDRDKSGNEFIRRMTGTDTYLLGEPTLPKNSLVYQEFNVLQELNNLRIEKRRLDIAVKQDIFEHVFKTNKTVTVKRIEEYLTTEFGSPVTLSGFANVNERKLNSSLSTYHYFVGIFGAEFVDDPKNLTLLEQIVELQTVFEDRKALQRQLKLRPELSEKQVKQLARTHYTGWGRLSQKLLTSKIVHVALEGEREPGQYSILETLYGTQMNFMEIVNDMKDRYGVKSWLDQENSGSENNLSLKQRILDMPGPKNIKRGINQAFHIIDEITRAVGNAPSRIYIEFARESQQSNLTNARVNRLKQLYSNQALKKEFAKLASEIKDLTKEQLKDDRLYLYYLQQGKDMYTETDIDITKISSNYQIDHIIPQAYTKNNSLDNRVLVNSEMNARKSDSPTFLPSLIQERKAWWRQLRDTGLMSTIKYNNLTRTSDDFSADQKERFIARSLVETRQVIKNVATLIKEYYDDSQVEALPSEITAEMRRYLNVRKNRDINDYHHAHDALLFATAGEFSRKVGIMEKGRVSDGAGNIYNRYTKDIIQRARAKAGQDKKVRPFTFIVGSMANPDTKFQTNQTTGEIVWTPEDVAYLRKVIDYKKMLVTKMTLDQTGTLYNETRYGSGDKHVAVALSKDKAADLYGGFGSLKPAYAALVYSKKKFRLVNVLRLWLPEIKKNASVLERKVQSVLGDDNAKVIRAHVPCGQLLIKDGALVTVSSATELHNFRQLWLPKADYQDISILLGAPDKVTAENRLQAESHFDDVDQRFESLLKDVIDQARQYYPLKTHQTSLEKLIGKIGKFDELKFAQKQQVFSRLLSALHANATNSDLKQIGLSTAWGRLIYPKGVSLTDEDKLINSSFTGLFNDVMSIKEFHDFSIN

SEQ ID NO: 290 - protein, 1366 aa, Lactobacillus concavus DSM 17758
MDKKYNIGLDIGTSSIGFVATDEDNHVIRAKGKNVIGVRLFDEGQSAAERRGFRTTRRRLNRRKWRLNLLREIFEPHIYPIDASFFMRQKYSNLSKQDPNQKIEFKDILFSDKSDAEFYRQYPTIYHLRQALMTEKRQFDLREIYLAIHHIVKYRGHFLDETPTDKFSFDQLDLTQEFERLNVLFSEQNPEEPFEIVVNQNQSIEDILSNQSMTASDRRKQALVVFYQQSENKENEKQYKAIATEILNLLLGNKAKLNVILAQEVDKEAAKDWSLSLSSETFDDDLEKASSGLNDSQLEMVGIFERIYSSLILKSIIGDHNSLSAAMVDKFKTHAQHRDLLKDVIKNSDATKGEQLQFAYDHYLQRHSADGKAYGKDDFYKEVKKNLDDSDAAQQIQQLIDTDQFMPKQRTKANGAIPHQVQQKELDLIIENQCQYYPWLAEENPNSERHNVAKYKLDELVSFRVPYYVGPLISPADDETDPQAIQNTKFAWMIRKDAQGRITPWNFDDKVDREKSADKFIKRMTTTDTYLIGEDVLPDQSLIYQRYKVLNELNNVRINGRPIEVQIKQNIYTDLFKKFKSVSVKKLRSYLEEMSYYPGSFKISGLTNPGKFDNGLTSYLDYKNILGDSVDANDKRADIEQMIEWSTIFEDNKIFAQKLESMTWLTAEQRKAISRKRYTGWGRLSNKLLTQLKNQDNRSIMDLLWETEENFMKIQSAPDFSKMIEAHNQQFIKNEANIQQVISDLYTSPQNKKAIRQILLVVDDIQKAVGHAPEHIAIEFAKGEDKNPRRTISREMKIQDVYQQISDDILVSPEVRAQLNEKIENRHGRLSDRLFLYFMQGGRDMYTGKPININNISHYDIDHILPQAFIKDDSLDNRVLVSDKLNREKSDTVPRDLFGREMMSTWEKMADRGLITKRKLANLKTIPGSIDAHKAQGFINRQLVETRQVIKLAVGIMIDQYPETQIVSVKANLTHEMREMFDLVKNRDVNDYHHAFDAYLTAFVGNYLLQRYPKLEPYFVYDKFKKLKDQNISMRDFNLLYDLKKNEDVYDQRTGHSAHKIWDQHGSIDYIRHLFAYKKILVSHEVHQNGGALYNMTVYGKADDAKRKLIPIKADKPTELYGGYTSRKLAYMAIVKTKKGKKEQYQVTGVPVSALTTLRQFKEDSPEQKQALEEIVRRNFDEKTEVEIIVPKVLFNQLIVDEKCRFMVGSDTYRYNAQQLVLSADDLEIINASHKDIQTIDSSDYSQQLDQVYQNILTIVDKHFPMYDINKFRTKLHDIYEQYIELPNEDVWENNKLTTLGKHTIIIRILQGLHANATVVDLKQLGIKTPFGFMQQARGIVVSPDAQLIYQSPTGLYERRVRLGDL

SEQ ID NO: 291 - protein, 1319 aa, Weissella halotolerans DSM 20190
MAYSVGLDIGVGSVGFAGIDNQYNLVRTKGKNVIGVRLFDEADSAAERRGHRTNRRRLQRRRWRLRLLDDIFAKPLQAVDPNFLARLKYSYVNKKDQGQQDHYYGGYVFGSTAADQAYHQAYPTIYHLRKRLMEDDQKHDLREVYLAIHHIVKYRGNFLNPQSSLDIDQQFDVTDFAQALARFADHQALSWALEAPIRFLEAELATGLSNSARVDAAIEAFSFDTKVDRAAIKEMLKGLSGNQIDFTKLFVNVDSADWDQEERKQWKMKLSEEDFDEQALPILERLSQDETEFFLAIKRAYDGIALMRFLGDEQSLSSAMIKAYEDHRRDLTFLKTQVRTPQNRQALSEGYTNYLSVDDKKHKRGAKELAQLIEASDASEQDKATMLDRIANDQFAPKQRTKANGLIPYQLHLAELKKILAKQGQYYPFLLDTFAKQGQSVNKIEELVQFRVPYYVGPMVPKSETAGNAENHWVEKNDGQTKVSVTPWNFDQVFNRDRAAKSFIDRLTGTDTYLIGEPTLPRHSLTYETFTVLNELNNIRIDGKRLPVETKQAIVEDLFKKYRLVTKKRLQDYFASFGKREVELTGLADESRFTSSLTSYHDLQGLLGTDFITNPQNHSLLEKIVEIQTVFEDSDIAERELGKLGLEQKLIPRLAKKHYTGWGNLSRKLLDTSFIHDPERPEEPVSIMDLLYTTNKNFMEILHDSEYGVEEWLKSQNMIDDQKDIQMRIDELTTSPANKRGIKQAFNVLDDITQAMGEEPAYVYLEFAREKQASRRTVSRKKRLETLYKNAALKTEFKAIKEALAEESDDRMQDDRLYLYYAQLGRDMYTGQSISIDQLSSHYDIDHIVPRAFIKDDSLENKVLVNRTDNARKTDSATFTADVKAKAFPLWQQLKKLGLISAKKFRLLTRTGDFTEMERERFIARQLVETRQIIKNVAALIEGHFSQTQAVAIRAEVTGELRQLTQIKKDRDINDYHHAQDALLVATAGTYLHRHFPKRDARFIYNEFDYYTQHWLKNQGENRRRHPYSFVVGTMSKGNEDWTPDNLNYLRKVMQYKTMLMTRKPVGPEGALYKETLIAADPKKRLVGASKERQDPTIYGGYTKESSAYMSLVRAGGKNQLVKIPVRIANEIHSGQRKLDDYVQAKVKKFERILLPKISLGQLVEDEGQRFYLATNEMKHNAKQLWLDQKVVTTYKRLTAESPVEDFLTVFDALTSSATIHHFKFYQRDLELLRDNRAGFQDLAKATQLKVLKDVLYELHDNAGWRDPIKQYFKEIGLKVRMWTKLQKEGGIKLTDQAELIYQSPSGLFEKRRRVQDLL

SEQ ID NO: 292 - protein, 1370 aa, Weissella kandleri DSM 20593
MEKNKEYVIGLDIGTGSVGWSAISTDNYQLIRQKGKNLIGVRLFNSAETAEERRGYRTTRRRLSRRRWRMSLLNDIFRPELNEIDENFLARLKYSWVSPLDQKNPQLNEQGTNASLYGDIEADQAFHRAYPTIYHLRKTLMEDNQKHDLREVYLAIHHIVKYRGHFLTPDFDANSQTIDIKGLFKQLGDVSGSIELQADQTSTVIAAFQSILLDFTKTPTESGRLAGQLFSDQNKDKQAKKQVEELFKLLRGGKGSLADMFLLTDLDKVVKNQLKFAFDDAVDENLNLISNLINEEQYELLLNIQKLRGTIILKQILGDDETVSDAKVRSYEEHAHQLKELKAQVLTKDNKEKFEEAYQLIQKGDASRIDGLKKLKTIINQEHEALRLDKYEADKLLKLIELDQLLPVQRSKRNGEIPHQLHEFELKKIIEKQGRYYPFLRETFERDGQEFNKIGQLVNFRIPYYVGPLVDPRLAGIQSGDQTNHWMTQKKAGKITPWNYTELIDIDKSAAEFIKRMTGTDTYLVGEPSLHKASLIYQDYNVLQELNNLRYDGKPLPVDAKQEIYSNLQVSLKNATKNKINSFLISEGYLQDGEELTGFAGKELKNKLSSFHYFKNIFGPERMNTLGTDNLEKITELQTVFEDRHMLKRQLQKLGFLDDDECEKLAGKHFTGWGNLSKKLLNTPAIIDPEINENKISLIDALYKGQRNLSFYVNNMDDKYQFRDWIESENQSQQVEISLDEKIKNLAGSPAIKRGITQSMAVIQDIIRANNGISPKRIYLEFARESQNSYQPNSRIKQIEKIYDQNKKELMKVYPDVFKDVQGVLNNVDENNSLSEKAFLYFMQLGKDMYTGEALDFDKLYTYDIDHIIPQAMTKDNSWDNKVLVTAIKNREKSNQVLDNAIQAKMHNFWLQLKKVNLLSQRKYDTLMKTNFSKGDEKKFIARSLVETRQIIKNVAELIKSEFDHVEAIPIRQELTSDMRQLMDYKKNRLVNDYHHAHDALLIATVGEFMQKRGFMQGMNPSQNVYHGYTQYVKKWLSMAKKARSAEKPERIFPLQFVVGSMRMAVRDGQVDKVTHPATGEICWTADNEAYLRKVLGYKNILVTRKVKNAGKLYQRVTVKPKGSGEAPVNHQKSDINIYGGVTSEQAAELVLIRIKAKNNAKNMVIKIPTAIANQVANKTTTYDAYVRSLNIPNYAGIILDQIPLGQLVFDERTSFYLASAEIKHNARQLWVNQHINNVLTKKNINDEERDNILNLLTNEKNLERFKLLEPDLKRVKAAKQQWASCDDQEQMQILRIIINKMHDDASPQIPGKIDPFKNYLDKQGKGWRDLRTKKGMKLSDNAEFVYQSPTGLYHRKISINELLKQKQLE

SEQ ID NO: 293 - protein, 1399 aa, Olsenella uli
MNLRNTTDEYNIGLDMGTNSVGWAVTDKAGAIAHFKGKPTLGSRLFDAAQTAAGARIHRSQRRRYVRRRWRLDLLQSLFQDEVSKVDSEFFCRLRQSRLYVGDREKGHADYTWPIFNDSDFNEVDYYKRFPTIYHLRKWLMETDEKADIRLIYLATHNIVKHRGNFLRENNKSLSSRDANPAQAVKSLRLALNDWCSERDYECAWKGEEDDGAIDEAILNVLADGEKGRSDQAKEIAKLTGVDCGDAKQSKQCNEAIAKAIVGLKVEMKNIFGEFPAEKTSYIYLSSDEDVEAVRESCPDDSGELFQALCKLYSAYILQELLSYADPSGQTISANMVAKYKQYGRDLRLLKELTRTYAPQKYDLFFRGETYAGSSDYVVDEARGYTRYNLGTTKANYDDFQKSVKELFKGTDALQDERYQEMMVAFGEQKFLRRLKTSDNGSIYYQLHLEELHTILENQGKHYPFLLSEEDKIESLVSFRIPYYVGPLTRKNAAIGHDGKERFAWSSRKDGMEHAVITPWNWEEIIDRDKSAEDFIMRMTGDCTYLQGEPVLPKCSLLYEEFCALNEFNGAHWTVDGDDERRFDAAQRERIMCDLFRRTRSVTYNKVSDWLERKYNFTGARVRGGQGEHGFESKLGSYIFFCKDVFKTDGLDEADYTMIEQIILWSTLFEDRDILKRKIEEAYGGDRLTSEQIKVICKKRFTGWGRLSKRLLTDIKVNTDTGRKSIMDVLREGNPNNGQRSRTMVFMEVLRDEDLGFQKAIDGLNRDYFREHNNGLMDVNDLPGSPAIRRSINQAVRIVDEIASIARKEPTNIFIEVTREEDDPRKKGKRTKRRYDAIKSALEKFKKDDPSLWKELCEKAPGDMDERLSLYFMQRGKCMYSGRPIKIEELHTGKYEVDHIIPRSYIKDDSFENKVLVYREENQHKTDALLIDSSIRQKMGGYWRMLHDAKLVGDKKFRNLFRNHIDDKAMKGFVARQIVETSQMVKLVQTLFEARYPNTRIVPVKAGISHDLREAAGLVKCREANDFHHAHDAFLACRIGLFIQKRHPSVYDNPIGLARIMRDYARMQAREYKKSHCLAHTQGFIVNSFLSSGFDEETGEIFKDDWDAKAEVEGIRRVLNCRQCFISRMPVEGDTRYGGRYWGETIYSPKGKHKHEIPLKQGLDPNLYGGYSDLLYSYFLIYEASDVSSGERVLRFIGIPTSIAARMANQKRLEEYVSRLALQENLEHVRMVRKIMKKQLIEVDNCRLLVTAADAVTNATELAFSLDEMKIISTCAKCINGADPSAIDKIGNAQDSFFDNLKRRGSDRCALLFSQLKLDKLSQNFYMISSDDKSKILISILDRIRAKSNSVDLSLVGGAKHAAQMKFDFNAKLNNPASSFVLIDQSVTGMFERRTRIGL

SEQ ID NO: 294 - DNA, 3720 bp, Bifidobacterium bombi
atgtctcagcacaggcgctatcgaatcggcatcgatgtaggattgaattccgttggtttggcggccgtcgagattgatgccaatcacgataatccattggatgagattcctatcagcattctgaatgcgcagtcagtgatccatgatggaggggtggatccagatgaggcaaaaagcgctacatcgcggagagcaagcgcaggagtcgcgcgtcgaacccgaaggttgcataaaagcaaacgtcaacgtctcgcaaaactcgacgaagtcctgaacgaactcggataccctgtcgaagacgagtcgcaattccctgccggatcaaacccctacatcgcttggcaggtgcgtgcgaagctcgcggagacattcattcccgatgttgaaactcgcaaaaggatgatatccatcgcaatacgccatatcgcccgacatcgtggttggcgaaacccgtacagctcagtagccgatgcggaacgtatgtcacatactccctcaccgttcatggtcgagtatgccaaaaaacttgatttcgaaataaatgacagaagaaccaatggcttttaccattctccttggcaaagtgtggatgaggaaggcaaaaggctatccaaatcagaattggaaaaacaaccaaaaatcgaagattggaacgacaatccaatcaatggaaagaccatagcccaattggtcgtctcttcgctagaaccgcaaaccaagatacgcagggacctgacacacggacttcaaactgaatcgacgttgaatattcagaccgagaaactgcatcagtcagactatattcacgaattagagaccattttcgagcgccagcacgttgatcagacgacgcaagaacaattactggaggccactttccataccaaaaatccaaaggcagttggagctgctgcaaaattggtaggaaaagatgcccttgactctcggtactatcgagccagtcgagcaactcccgctttcgaggaataccgggtcatggctgccatcgacaccttaagaatacgtgaacatggaacagaacgtcaactcacaacagacgaacgccgaaaactgtttgacttcatcaagggactgccttccaaaaaaacgaagaacgaaccttcaattagctctcttacttggggtgatgttgctgactttctcggaatacaacgaatcgacttgcgcgggttaggctctcttaaagacggagaaccggtgtcggcaaaacagccgccagtcatcgaaaccaacgacatcatgcagaaggcccctgaccctattgcagcttggtggtcacaggcgaacactaaagaacgagaccgtttcgtcgagttcatgtcaaacgcgggcgcaataaaagatacatcagatgaagttcgtaacatcgatgcggagatttcacaactgttggaagaactaacgggctcagagctcgaatccctcgacaagattacccttacttcaggaagagcagcatacagctctcagacgttacgcaacatcaccaactacatgtacgaaaccggctgtgatttaacaaccgcacgccaagagctctatcatgtcggcaagaactgggctcccccagctcccccaatctatgagcataccggcaatccatcggttgacagaacgttcagcatcattcatcgctggctatgcaatatgagagaccagtatggtgaaccagaaaccgtgaacatcgagtatgttcgagatggtttctccagcacgtccacacagctggctgaacagagggaacgcgataggaggtatgccgataaccttaagatgttgtctaactacgaaggagcaagttcacgctcagacgtccgccgcatcaaggcacttcaacgccagaattgccaatgcatttattgcggacgtaccataacgttcgagacctgccaaatggatcacgtattgcccagaaagggccctggatccgattccaagttcgaaaatctagttgccacatgcggcgaatgcaataaaagcaaaagcgataccctctacatgaattgggcgaaaacgtacccaaatactaatttgcaagacgtcctgagacgaattcaggagtggagcaaagatggttggatgaccgacaagcgctggagacaatataaggaagcgctgattctgagattggaagcaacggagaagcaagagccactggacaacagatccatggaatccgtctcatacatggcaagggaactgcgcaatcgcatttacggtttctacggttggcacgatcaagatgacgcactcaaacaaggcaggcaacgggtattcgtttcatcaggctcgatgaccgcagccgcacgaagaacgccatttgaaagccctctgatcaaaggcgcagacgaagagacgtatgaatcatcattgccctggcttgacggtatgaagggcaagacccgtctcgataggcgtcatcatgccgtcgatgcgagcatcatcgcgatgatgcgccctcagattgtaaaaatactgacagaagcacaggagattcgttctgagcagcacgacaagtacaggaaaggtcagacgccggactacgtgtgcaagcgtcgcgattattggcgcaattggagaggcacgccagacacgagagacgaagaggtcttcaactattgggctggcgagcagctaagaacgcttacggatcttgtgagccagaaaatggcggatgatgaaatacccgtcatctatccaacaaggctccgactgggcaatggaagcgcacacaaagataccgtcgtctccatgatgacaagaaaggtcggagacgaattaagcatcacggccattaataaagccgaatccggtgcgttgtacaccgcgctgacacgggattctgatttcgattggaagacgggtttgtcggcaaacccgaaccgtcgcatcagagttcacgataagtggtttgaagctgatgacaccatcaagttcctggaaccggctgttgaagtggtgctcaagaataacacgagagccagaatcgacccggaagcgcttgataaagttcacagtacgctttatgttccagtccgcggtggcatcgcagaggcaggaaattcaattcaccatgtacgcttctataaaattccaaaattgaattctaaaggcaaacaaacaggtagcatttatgccatgcttagggtgctgaccatcgatcttgctatgaaccagtacgataaagaaaccggcaaaaaacaagatctattcacacttccactcccggaatcctcattaagcagaagattcagcgagccgaagctacgtcaggcgttgattgacggcactgccgaatacttgggttgggctgttgtggatgatgaacttgaaatccctgcattcgcaaacgccaggataaccgaagaacaggccattaacggcagcttcacagataggttgctccattccttcccaggaacccataagttcagattcgctgggttcagtcgaaacacagaaatagcaatcagaccggttcagctggcatcagaaggattaatcgaaacagacgaaaaccgcaaaaggcaacaactacgactcactcaacccaatacagaatatagcaacagtattaaaaatgtcctaaagagtggcttacacttgaaagtcaacacgttattccaaaccgggattctcgttacccgtgccaactctcagggtaagcaaagtattcgattctcaacagtagaagaataa

SEQ ID NO: 295 - DNA, 3366 bp, Bifidobacterium dentium LMG 11045
atgtctgtgggattggccgcaattgaagtagacgaaacaggctttcccatcagaatcttgaacattcagagtgtaatccatgatggtgggatcgacccgcagctaggcaagaagaagtcgatatcccgcaaggccatttccggcgtcgctcgaaggacccggcgcatgcgcagaagaaaggtcgtgcgtcttcgtcagttggatgcgactcttgagagtttaggcttcccgattgtcgaaccggattccctagacacttgggagatttggctcacccgcgcgaaattggcgagttcttatattcaggatgacgagacccggaaagaggatgtctctattgcgttacggcatatcgcacggcatagagggtggaggaacccatattcgaacgtcgagtcgctgttcgtggacgtcgcaccttccgaacaatacgaagagcttagaagaaaggccgaggaaaagctcggcacgagtctgtccggcaacccgacttccgcggagatcgtcgaatgcatcttgaagagacaggttggtgaagtccagttgcgcaccagaagccgtaagggcgtgaatggcaatgcggtggaaaaagaaggactattgccgacgaagttgatgcagagtgacaacgccgcggaaattcgcaggatattcaaggtccagaggatagacgatgagacggggagaaaactgctcagggcggtcttcaaggcgtgctccccgaaagggtccgtggaacggagggtgggtagggacgccttggctcccggacttccccgtgctcttaaggcatcgttggcgttccaagagtatcggattgcaaatgtcctcacgaatctcgtcatttcagaagatgggacgaagagaaaactgacaatcgcggagaaacagcgtgtctttggttttctttcttccaatgagaccgatgacattacgtggattgatgtggccgaaaaattgggattggaaagaaggcagattcaaggcgtcggctgtctgaccgccgatggcgaagaaagaatctcctcgactccgccacgtaacatcaccgcgctgcacatccattcggcgaaaccggtaataagggaaaagctcgttgcgtggtggaaggctgcgtctcccacggtgcgggaaaccatggtagagctcctttcgaatacggtcgatattgaccgcgtccgcgaagacatggactactcgtcggcggtcgcgttcatcgattccttgggtgacgaggaactgactgcgctggattcggtggatctcctgtcgggacgtgctgcgtattcacgtcagacattgaagcagctgacggaaagaatgctgaatacagatgacgacctgcatgaggcccgcaaggcggtttttggcgttgacgacaattggaagccgccagtcgatgcaatcagcacgtcggtggggaatcccgccgttgaccgtgtcctgaaaatcgtgaacagatatctgttggcatgccagaaacggtggaggaatccccagagcgttcagatcgaacacgtgagggagagcttttcttccgtcgccaaagcgaaagagacggaaagggttcagggtgaaagagcacgataccgcaatgatctgaggcgagagctttgcgagcaggaaggacttaataagatacgtgaatctgacatcagacgttgggaatcggtccaaaggcagaatggaacgtgcctgtattgcgggtcaccgataacattcaggacctgtgagatggaccatattgttcccaggaaaggcgttggctcgaccaatacgcgggtcaatctcgcggccgcatgcgcggcatgcaacaagctaaaatccaatacagccttttccgtgtgggcgagaacggagggcgcggccaaccgtaaggtcagccagcgtgacgcaatcgaaagggttaagaccttcatctttaacaagtccgtgccaccaagagagcaacgcgcgttcaaacaggccgtaatctcaagactgagacaggccgagtcggatccggcaatagacaatcgctcgatcgaatcagtggcgtggatggccgatgagctgcatcgccgcattgaggcgtatttcaatcaggatgccgatgtgtcggggaatactccagccacccaagtgtgggtgttccaaggccgggtgactgcactggcccgtaaagccagcgggatcgaagggcgcatccatttcgcaggagagtggaaaaagacccgtctcgacaggcgacatcatgctgtcgatgccgctgtcatcgcgatgatgaaccattccgccgcgcaaaccctggttgaacgtgattcgcttcgcctctcgcaatggataaccaggaagccggaaacatggaagaactatcctttttcagaaggtcaaaagaaaacgcgtttcaaggaatggctcgactgcatgaatgcgcttctggaccttctgaatgacgcactcgactcggaccgtgttcccgtcacgcgttgccagaggatgtctctcggcaattcccaggcgcatgctgcgaccatcagaaaaatgaagcgtgtggaacttttctcgcctatggatgccgatttgatacgcagagcatccacgcccgcattatactgtgctttgacgagattgccggagtattctcccgagaagggtctgcccgagaatcgtggtcgtgagattgtgctcaacggcaggcatattcgatcaactgagacagtcgatttctttgcgagtggtgccgcccagctaatggtacgtaacggatccgccgaaatcggggattcgattcaccatatgaggatataccgttatcgaaagactggggcaaaatcgcaggaatacgtgtatgggatgatccgagtattccagattgaccttctccatgcgtcgtcggagaatctttttgcggtccagcttccgtcccagtcggtttccgtgagatacggggacaagaatgtggtccaagcgatacaagaggggcgtgcggagtatctcggccatatcgtccctaacgatgagatcctgattagctacgaaggcgtccggatgaaagacagcgagaaaatcggtgcatacgcgaatgatttcagtggtaccgcatccgagctcgcgcagcgacgacactgggtggttgtcggatctgatgtcagtaagttggccttacgtccctcttatctttccgaagaaggactagaaaacagcggatcggaatctgaacggctttcaaagcagacacggaaggtgatcgaaggcaaaggatgggtcgtcgcggttaatatactggccaaataccatcctgtcgtgataagacggaatgcgttgggcgagccaaggttccggaccaattccgggatgcctgtctcgtggcgctgggacaggtag

SEQ ID NO: 296 - DNA, 4173 bp, Bifidobacterium merycicum LMG 11341
atgagccggaagaatatcgttgaagattacgccatctcgctggatataggcaatgcttctgttggttgggtggcgttcactcctaattatcgtcttgttcgcgcgaaggggcacgaacttattggcgcaagactgttcgaacctgcttccacggcggaagagcgcagaatggcacgaaccactcgtagacgttactcccgtcgtcgttggcgtctacgtatgctcgattcgatgtttgaccaggcgttgtccgaggtggatccgtctttcctgatgcgaaggaagtattcttgggttcaccccgaagataagaataatgaagctcattggttcggtggcgtcctgtttgactcgaatgagcaggataaacgtttttacgagaaatacccgactatctaccatctgcgtaagagtctgatggaagatgatgagcgtcatgatatccgagaggtgtacctcgccatccatcacatgatgaaataccgtggcaatttcctcacggaaggggaattggccccttcttcggttttcgatgtcgaggattttctcaagttgctcacggaaattctgcaatatgctgatgaaggcgaaactgacgaggatctggagctgcaagcggatgcgaatgggctgacggaagcgctgtgcacgaccaaaggctctcgctccatacgtgctaagaatgcaatctccattctcaaggaaggtgccgcattatcgaagcgccaagaggctatcattagcgcagtgtttgccggtcttgaaggcaacaagcttgatttgacgaaggtgtttcctaataaggaatacactccggaagacaagaaaacgctcgcgctctatttcaacaaggccgattatgacgagaagcgtgtcgcaatcggtgattctggtctgctggaagataatgaatgcgattttctggactgtattcggcgacagtacagtgccatcgctctgaaacagttgctgggagatttcacaagcatttctgagtcgatgtgcgcgagatatgaacagcatcaacggaattgggacttgatcaagcgctattgccgcgaggaatccaatgcagaaaatatcaacaagaactacggcgctctcgtaggctgggaaatcgttggaggacagcgaagaagcattcgcggtgcaaaggattatgagaacaagcgcaaagcagccaacaagttctttgaggagctgattaaaggttctgctttgcctgatcaggagaaagaaagacttctccacgacatcgaaaacgatgagttgttccctgtccaaagggactctggcaatggcgtgattccctaccagcttcatctgaacgagttgaagaaaatcatccaaaaacagggacggtattatcccttccttctggagacctatatcaaagatggtaaggaagtcaataagctagaaggtttgcttgctttccgcgtgccttattatgttggtccgctggtatcgcgtgatgacatgcagtcgtccgataatagggaaaaccattggatgattcgcaggaagaagggcgtgattacgccttggaactttgacgagatggtcgacaaggataagtcgggacacgaattcattaagagcttggtaggcacggacagttacctgcttggcgagacgacgttgccaaagaattccctgctgtaccaggaattcgaagttcttaacgagttgaacaatgtccgtctgtctattcgtacaggcaaccattgggctgataagcggcgcgtgagactcggccacaatgagaagaaactgttgcttgaagaactttttgccaaacaagcaacggtcaccaagaaggctgctgaaaatctgttgcgcagaacatatgggaacacctatgagatttccggcttggctgacgagaagaaattcgtcagctccctgtcttcgtatgggaagatgtgccgcacgctcaaagcctcctatgtgaatagtcataaggatgtcgttgagaagattattgagttgcagacggtgtttgaagataaaaagactttgaaacatcagctgcagctgcttggcgagctggcggaaaccaattgcgagctactctccaatacgcattacacaggatggggcaagctgtcaagaaagcttcttacctcgaaggtagttgtttgcaagatcgggaatgatttcgctcctgcaaaacacagcattatcgagataatgcgggaaaccgaccgtaatttcatggagatcatcaccgacaaggatcttggcgtcggggagtggattaaccagcagaacgttggcgccgaagatgggaactcctatcaggatataatcgatgacctgcgtgtttcgcctaaggtcaagagaggtattaatcaggcgattcgagtcattgatgatatctcgaaggcagtaggcaaggaaccgtcgcggattttcctggaactcgcgggagatgtccagcaaagcgcccgaacggtatctcgaaagagccgtttgcaggggttgtacaagagtgctggattgcagaaggagttccgggacctcgccgaatcattgaacgagtgcagtgataatgatttgcgagacgataggctgttcctgtactacacgcagcttggtaaagatatgtataccggagaacccctgaatcttgacaggctctcttcggattacgatatcgatcacatcatcccacaagccgtgactcagaatgattctctggataatcgagttttggtagctcgcgtggcaaacgcgagaaagacggactctttccagtatctgcccgaaatcgcgaaccgtatgaggaatttctggcaggagctgttggacgctggtctgattagtcgtgttaagttcgacagactgaaccgtcagaatgatttctcctcccacgagaaggagcgtttcgtccagcgctcgctggtggagactcgtcagattatgaagaacgtcgccaccatcatgcgtaagcgttatggaaacagcgctgcggtaatcggtttgaattccgagctaacgaaggagatgcgtcaatatcttggtttctctcataagaatcgtgacattaacgactatcaccatgcacaggatgcgctatgcctcggtattgcgggccagttcgccgttaataggggcttcttcgctaatggtatggtttccgatggggcagtgaattcctacaatctgtatctgcaggattacctgcgcggatacagggagaaaatgagtgctggggagcgcagaagaaataaagcgtttggctttattgttggttcgatgaattcccaggattcagacaagcgtatcaatcctaagacgggagagattgcttgggatgatgaagataaagtatatcttcgcaaggtgatgaattaccgtaagatgctcatcactcagaaggtgggtgatagctttggcgcgttgtataacgagacccgttacggaacttcagcgaaggaaggtgtcaatggcatccccttcgataagcacaagcaggatactgctttgtatggcggcttttcgagcgcgaagacggtctacgtcgttctgattgaagcgaagaagaaaacacgtctagtgaatatcacgatgcaggaatacgccgagttgggagatcatccttccgacgatgcactgagagcggttctggctaagaaaaagccggaatatgggaaggcgcgcattctgctacgtcacattcctccgatgcagctgattcgttatggtggggccttggttacggtcaagtctgccactgagctgaataatgctcagcagctatggcttccatataaggaatattgtctgttcgatgatgtgataagttctgcgatcgatgtggatgaagcgcggctttgccagatgcttgacgtgattttggatgccatacagaagtattacccgaagcagcgttttgacgagactggcttgtctgctttccacaatgctttcaacgaggtttctgcggaagacaagaagagaattgtcggggaaatggtaggaatgctgcatgctgatgcaaagaatgcgaacttgaaagctcttggaatgagtgggaggtggggacgcatgagtaatcagtcaggatatacttttgctgattctgacgagttcatcttccagtcgccgtctgggctgtttgagaagagaatcagtgttggcgagttgaagaagaggagagcgagataa

SEQ ID NO: 297 - DNA, 4035 bp, Kandleria vitulina DSM 20405
atgagtcaaaataataataaaatttataatattggattagatattggagatgcatctgtaggatgggctgtagtagatgagcattataatctattaaaaagacatgggaaacatatgtggggctcacgtttatttacacaggcgaatacagctgtagaaagaagatcaagtcgttctacaagaagacgttacaataagagaagagaacgtattagattgttaagagaaattatggaggatatggtattggatgtggatccaacattcttcattagacttgcaaatgtatcatttcttgatcaggaagataagaaagattatctaaaagaaaattatcattcaaattacaatttgtttatagataaagattttaatgataagacttactatgataaatatcctactatttatcatttaagaaaacacttatgtgaatcaaaagagaaagaagatccaagattaatttatcttgctttacatcatattgtgaaatatagaggaaatttcttatatgaaggccagaagttctctatggatgtttctaatattgaagataagatgattgatgttttgagacaatttaatgaaattaatctgtttgaatatgtagaagatagaaagaaaattgatgaagtacttaatgtattgaaggaaccactatcaaagaaacataaagctgagaaagcatttgcgttgtttgatactactaaagataataaagctgcttataaagaactttgtgctgctttggcaggaaataaatttaatgttacaaaaatgttaaaggaagcagagttacatgatgaggatgaaaaggatatttcatttaaattcagtgatgccacttttgatgatgcctttgtagaaaaacaaccattattaggtgattgtgtagaattcattgatttattacatgatatctatagttgggtagagttacaaaatatactaggttcagcacacacatctgaaccatctatttctgcagctatgatacagagatatgaggatcacaagaatgatttaaagttattaaaagatgttatccgtaagtatttacctaagaaatattttgaagtctttagagatgaaaagagtaagaagaataactattgtaactacattaatcatccatcaaagacaccggtagatgaattctacaagtatattaagaaactgattgagaagattgatgatcctgatgtaaagacaattcttaataagattgaattagaatctttcatgttaaaacaaaattcacgtacaaatggtgctgttccttatcagatgcagctggatgaattaaataaaatcttagagaatcaatcagtttattactctgatttaaaagataatgaagataagattagatctattcttacttttagaattccttattattttggtccacttaatataactaaagacagacaatttgattggattattaaaaaagaaggaaaagaaaatgaaagaattctcccttggaatgcgaatgaaatagtagatgtagataagactgctgatgaatttattaaaagaatgagaaacttctgtacatacttccctgatgaaccagttatggcaaagaattctttaacagttagtaagtatgaagttcttaatgaaattaataaactaagaattaatgatcatcttattaaacgtgatatgaaagataagatgctacatacattatttatggatcataaatctatttcagctaatgcaatgaagaaatggttagttaagaatcagtattttagtaatacggatgatattaaaattgaaggtttccaaaaagaaaatgcttgttctacatcattaactccatggatcgatttcactaagatttttggaaaaataaatgaatctaactatgatttcattgaaaagattatttatgatgtaactgtatttgaagataagaaaatcttgagaagaagattaaaaaaagaatatgacttagatgaagaaaagattaagaagattcttaaattaaaatatagtggatggtcaagattatctaagaaattgttatcaggaatcaagacaaaatataaagatagtacaagaacaccagaaacagttttagaagtaatggaacgcacaaatatgaatttgatgcaggttatcaatgatgagaaacttggcttcaagaagactattgatgatgcaaacagtacaagtgtatctggtaaattcagctatgctgaagttcaggagttagcaggttcacctgccattaagagaggtatttggcaagccttattgattgtagatgaaattaagaagattatgaaacatgagcctgctcatgtgtatattgaatttgcaagaaatgaagatgaaaaagaaagaaaagattcatttgttaatcagatgttgaagctttataaagattatgattttgaagatgaaacagagaaagaagcaaataaacatcttaaaggtgaagatgcaaaatctaagataagatcggaaagattaaagctttattatactcagatggggaaatgtatgtatacaggtaaatcattggatattgatagattagatacatatcaagtggatcatattgtacctcagtctttattaaaggatgatagtattgataataaggttttagtattatcaagtgaaaatcaaagaaaattagatgatttggttattccttcaagtataagaaataagatgtatggattctgggaaaaattatttaataataagattataagtcctaagaagttctattcattaattaagacagaatttaatgaaaaggatcaagaacgttttattaatagacagattgtagagacaagacagattactaaacatgttgctcagattattgataatcattatgagaatacaaaagttgttacagtaagagctgatttatctcatcaatttagagaacgttatcatatctataagaatagagatattaatgatttccatcatgcacatgatgcatatattgcgacaattctaggaacttatattggtcatagatttgaatcattggatgctaaatatatttatggtgagtataagagaatatttagaaatcagaagaataagggtaaagaaatgaagaaaaacaatgatggatttatccttaatagtatgagaaatatctatgcagataaggatacaggagaaatcgtttgggatcctaattatattgatagaattaagaagtgtttctattataaagattgttttgtgacaaagaagttagaagaaaataatggtacattctttaatgttacggttttacctaatgatactaattcagataaagacaatacattggctactgtacctgttaataagtatcgtagtaatgtgaataaatatggtggttttagtggtgtaaattcatttattgttgcaattaagggtaaaaagaagaagggtaagaaggtaatagaggttaataagcttactggtatacctctaatgtataagaatgcagatgaagaaataaagattaactatcttaagcaagcagaagacttagaagaagtacaaattggtaaagaaattctaaagaatcagcttattgagaaagatggtggattatattatattgttgcgcctactgaaattattaatgcaaaacaattaatattaaatgaatcacagactaaattagtttgtgagatatataaagcaatgaaatataagaattacgataatcttgatagtgagaagataattgatttgtatagattgctaattaacaagatggaactatattatccggaatatagaaaacaattagtaaagaaattcgaagatagatatgaacaattaaaagtgatttctattgaagaaaagtgtaatataattaaacaaattttagctactttgcattgtaattcttctattggaaaaataatgtattctgactttaaaattagtacgacgataggacgtttaaatggtagaacaatttcattagatgatatttccttcatcgcagagtctccgacaggaatgtattcaaagaaatataagttatga

SEQ ID NO: 298 - DNA, 4059 bp, Lactobacillus agilis DSM 20509
atgtctgaaaaagagtaccatttaggtcttgatattggaactaacagtataggttatgcagtgatggattgcaattatcatttaatgagagcaaagggtaaaacattaattggtacaagcttatttagagagggaaacacggcagcagagcggagaggatatcgaacgacacaaagacgtttaaaacgtcgtaagagaaggttaaaacttttagaagctttttttgatccttacatttttgaagtagacgagaacttcttagcgcgtctccatgaagctgatatttcgcctaaggatgaaaataaacgcttttggggctccttgctttttccaaatgaaaaggatgctaatttctataggaagtatccgacaatttatcatttgcgaaaggctttgatggaagaagataggaaattcgatgtaagggcaatatttttggcaattcatcatattatgaagtatcgtggtaatttccttagcccattatcggtagatagttttaagcaagaaggtttagaattaaaagaacaactagacaggcaattaaaacgagtggcagagttatacaacgaattaaatacggatgtcaaaattaatgtgagtgatgtcgaaactattcaagatattataattgataagaataaaagtaggcgtgacaaagctggagcacttaaaaagttactagcagtttcaagtgaccgtaaagaaattaataagctgaatgcttcacttgctaaggaattaagtaatgctatcttaggtatgaaagcccagtttgctaatttattgttagctgatgatttagaaatagacaaaaataagaaaaacttttcgctattggatactaatgccgaagaaaatgtcagtggattgttagaattagtcaatgaaaaacaagctgaattgtttgatgcaataaagacaattcatgatcaaattattctaaatgaaattgttccagacgggaagagtatttcgcaatcaatggtagataaatatgaggcgcatagggagcaattacaagtattaaaggctttgtacgaaaagatggatgctaagcaaatcaaagctataaagaaagcatatagtttgtatattgatgggaaggatccaaaagctaagaaagtagataagcgtgcacaccaaaatagggctgatttttataaagaggtaaagaaagtcttagttgagttagacgattcacgggctgaaaagttacttggtttaattgaaatgggacaattcttacctaaacaaagaacagcaatgaatggggttattcctaatcaattacaccaagtggaattagataagattattgaaatgcagtccaaatactacccttggttagctgagaagaatccagtgaaaagtcatcagaagcgggcgccgtataaattagatgaactgttaacctttagagtcccttactatgtaggtcctatggtgactagtaaaaaacagcaacaaacctctaatagtaattttgcttggatggttagaaaacaagaaggggagataactccttggaactttgaagaaaaggttgatacaattgcatctgcaaatgacttcatcaagcgaatgaccgccaaggatacttatctggttggcgaagatgttttaccagctaatagcctactatatcaacgttataaagttcttaacgagcttaacaatattaaggttaatggaagacgactaccagttgaattaaaacgagaagcatatgttgctttatttgaaaacggagatagtaaaacagtttcagctaaatgttttaaaaattggttgaacgttaaactgaaaaacttgaattcccttaaattagagggcctaagtactgggactaagtttgataataatttatccacttatcatgatttaaagaagatatttggtaaggcagtagatgatgctggcagacaaaaagattttgaacagattatagagtggcttacaatttttgaagataagaaaatcttaagaattaaactgaaagagattgagtggctgacggaagaaaatattacacaactaacccgacttaattataatggttggggaagactttcaagaagattattaactggaatttgtgatagtaatggtcaaagaattatggattggttgtgggacactactaataattttatgcaaattcagtctcaaccagattttcaaaaagccatcgtcgaatataatagtgataaattagagcaaggagatattgaacagattcttggtgaagcatatacatctccacaaaataaaaaagcaattcgtaaggttattaaggttgtccaagatgtagagaaggctatgggagctaaacctacatccatttccatcgaatttacaagaagcgatgggcgctcagaattgactaattcacgaatgacacaacttcaaaaaactttgatgagtctttctgaagaaatgacggaccaagctttgctagctgagtttaaagattttcaagcaagtaagaagaaactaacgaacaagtattatctatatttcactcaattaggtcgagatatgtacacgggggaaccgcttaatattgaccagttgagtttatatagtgatggcgatcatatcttaccacggtcttttattaaggatgattctttagacaaccgagtattgacaaaacgtgcggttaataatgagaaatcagatacggtacctgtttgtgaatatggtgctaaaatgaaggatttctggaatgatttatatgataacggactaattagtaaacaaaaactggctaacttgcttactgatccggacgagattggcccatataaggctaatggctttattcggagacaattagtggaaacttcgcaagttattaaattgtctgctgaaatactgcagacattgtatcaagatacaaaaatcatagaagttcgtcaaaagtatacacatgaactacgtgaacatttcaattttgtgaagattagacaactcaacgattatcaccacgcttttgatgcttatttaacggcgtttagtggacgatacttatatcaacgatatcctaagttacgtggttatttcgtttatggcgattacaataaatttgatgccaaaaaagaccgtaattacctaaaatcatacaatttcttgtatgatttagaagaaggaaagaccgaccaaatagttgataatgtcgaacataaggtattcatgaatcgtcaagacgcaattaatcaactgaaaaaagcatatgaatataaatatatgctagtatcgcaagaaacctatacaaacagtggagctatgtttaaggagactatctacccggtaaatccaaaacagaagttaattcaaaagaaaaacgataagccggttgacatttatgggggatattctaataactacgatgcttacctttccatagtacgattggaagataagaaaggtatcaaatttagggtggtaggaattccgatgagaaacaaggcggaattggataatcttgccaaagaggaccacaatggatatatgcaacgattaaatgagattgttgatgagcagataaatagttcaggtaagaaaaagacttttagaattatccttccaaaggttcattttaagcaacttgtagaagatgatagcggtaaatttatgttgggtagtgctgcgtacccatataatgcaaaacaattagttttaagtgtgaaaagtatcgaatctttagctaataaagatgctagtgatagggagttagtagctgtttatgaggaaatattgaacgtagtgaatgataaatttacgttgtatgatgcacgacagtttagaaataaattaacaagtagcaaagataaatttgtagaattaaatacagcagataaagtaacggaattgctagatattttggatgggttacatgctaatcctgttgttaaaaaattgaaaattatcagcgggagtccattcggatttttacaacgtccgtcaggaatagtgttaactgagaacgctaagttaatttatcaatcaccaactggtatttttgaaagagttgtttatttgagagatttatag

SEQ ID NO: 299 - DNA, 3957 bp, Lactobacillus animalis DSM 20602
atgggaagtaatatgctgaaaaaagattatagtattgggttggatattgggacaaactcagtgggacatgctgtagttactgatgattataaagttcctaccaaaaagatgaaagtttttggggatacatctaaaaaaacgatcaagaaaaacatgctgggagttttactgttcaatgaaggacagacggcagctgatacccgtttgaagcgcgggactcgccggcgctatacccggcgaaaaaatcgtttgcgctatttacaagagatctttgcaccagaattggctaaggtcgatcctaatttcttatatcgactagaagaaagttcactggtggctgaagataagaagtatgatgtgtatcctatctttggaaagcgtgaagaagaattactgtatcatgatacatataagacgatctatcacttacgcagtgcactagctaataatgatcaaccagctgatctaagattggtttatttggctttagcacatattatcaagtatcgggggaattttttactggaaggtgaaattgatctaagaactactgatatcaacaaagtatttgcggagttcagtgaaactctaaatgagaatagtgatgaaaatttgggtaaactagatgttgctgatatcttcaaaaataatacattctcaaaaacaaaaaaatctgaagaactgctgaaacttagtggggctaagaaaaatcaactagctcatcaattattcaagatgatggtcggcaatatgggtagcttcaagaaagtgctagggaccgatgaagaacacaaattatcctttggaaaggatacatacgaagatgatttgaatgacttattggctgaagctggtgatcaatatttagatatctttgttgctgctaagaaagtgtatgatgcagctattttggcaagtattttagatgtaaaagatacgcaaacaaagactgttttctcacaagcgatgatcgaacgctatgaagaacatcaaaaagacctaattgaattgaaacgagtctttaaaaaatatcttcctgagaaatgtcatgactttttcagtgaacctaagatcagtggttatgcgggatatattgatggcaaagtaagtgaagaagatttctataagtatactaagaagactttgaaggggatccctgagacagaagagatcttacaaaagatcgatgctaataattatttgcgaaaacaaagaacatttgataatggtgcgatcccgcatcaagtccatttaaaagaactagtggcaatagttgaaaatcaaggtaaatactatcctttcttacgtgaaaataaagataagtttgaaaagatcttaaacttccgaatcccgtattatgttgggcctttagcgcgcggaaacagtaaatttgcatggttgacccgagctggtgaaggaaaaataacaccatataactttgatgaaatgatcgacaaggagacttcagctgaagatttcattaaacacatgacgatcaacgatctatatctaccgactgagccagttttgcctaagcatagtttattatatgagagatacactatctttaatgagttagctggtgtcagatatgtgactgaaaatggtgaggctaagtattttgatgcccaaaccaagcgctcgatctttgaactttttaaattagaccgaaaagtaagtgaaaaaatggttattaagcatctgaaagttgttatgccagccatcaggatccaagctttgaaagggttggacaacggaaaattcaacgcttcttacggaacctataaagatttagttgatatgggtgttgcgccagaacttttaaatgatgaagtaaatagtgaaaagtgggaagatatcatcaagactctaactatctttgaaggacgcaaattgatcaaacgtcgcttagaaaactatcgtgactttttaggcgaagatatattacgtaaattgagtcggaaaaaatatacggggtgggggcgcctttcagctaagctgttggatggtatctatgacaaaaagacacataagacgatcttagattgtttgatgactgaagattacagtcaaaatttcatgcaattgatcaatgatgataactattcattcaaggaaacgatcaaaaatgcccaagtgatcgaaaaagaggaaactttggctaaaactgtacaggaattacctggaagtccagctattaagaaggggatcttacagagtttagagatcgttgatgagatcatcaaagtcatgggatataagcctaaaagtattgtagtcgaaatggcgcgtgaaacccagaaaacgcatgggacacggaaacgtgaagatcgagtgcaacagattgtggaaaacttaaaagatgctaatgaattacctgaaaaattgccaagtaatgctgaattgagtgatgaaagaaagtacttgtattgcttacaaaatggacgtgatatgtataccggggctcctctagactatgaccatttgcagttttatgatgttgaccatattattccgcagagctttttgaaagatgattcaatcgaaaataaggtcttaacgatcaaaaaagaaaatgtccgtaagactaatggtctgccaagtgaagccgtgatccaaaagatgggaagtttctggaaaaaattgttagatgctggagctatgaccaacaaaaaatatgacaatctacggcgtaatcttcatggcggattgaatgaaaaactaaaagaacgttttatcgaacgccaattggtcgaaacacggcagatcactaaatatgtggcacagctcttagaccaacgactaaattatgatggaaatggtgttgaacttgatgaaaaaattgcgatcgttactctaaaagctcagttagcttcgcaatttaggagcgaattcaaactgcgcaaagtaagagcgctcaataatttacatcatgctcacgatgcttatcttaatgctattgtagccaatttgatcatggcaaaatatcccgaattggagccagaatttgtctatggtaagtaccgcaaagctaagtttaaaggtttaggcaaagctacagctaaaaataccttatatgctaacgttttatatttcttaaaagagaatgaagtatatcctttctgggataaagcacgtgatctcccaacgatcaagcgttatttatatcgggcacaagttaataaagttcgcaaagctgaacgccaaatcggtggcttttctgatgaaatgttggtacctaagagtgattcaggtaagctactgccacgaaaagaagggctcgatccagttaaatatggtggctatgccaaagcggtagaaagttatgcggttttgatcactgcagatgaagtcaaaaaaggcaaaacaaagaaagtgaaaactttagtaaatattccgatcatagatagtaagaaatatgaggctgatccaactgcatatttagctagtcgtgggtatacaaacgtcacaaatagttttattttgcctaagtatagtctgcttgaagatccagaaggtcgtcgtcgttatctagcaagtttcaaggaatttcaaaaagcaaatgaattgatcttgccacagcatctagtagagttgctctattgggtcaatgcaaaagatggagagcaaaaattagaggatcataaagctgaatttaaagaattatttgataagatcatggagtttgcggataagtatgttgttgcacctaaaaattcagaaaagatcagacgcttatacgaagaaaatcaagatgctaccccaatggaattgggtaagaactttgttgagctcttgagatatacagctgatggtgctgcgagcgatttcaaattctttggcgaaaatattccacggaaacgatataattcggcaggaagtttgctcaatggaacattgatctatcagtcaaaaacggggttatatgaaacaaggatcgatctaggtaaattataa

SEQ ID NO: 300 - DNA, 3951 bp, Lactobacillus apodemi DSM 16634
atgcttcaaaaaaattatacgataggtttagatattgggactaattcggtaggttatgcggttatcaatgataattacaaagttccagctaagaaaatgaaagttttggggaacacagataaaaaaacgatcaagaaaaatttaatgggtgttttattgtttgatgcgggtgaaacagcagcaactactcgtttgaagcgtggaacgcgtcgacgttatactcgacgaagaaatcgattgcgctatcttcaagaaattttaggaccagaacttgccaaagttgatgccaactttttgcatcgtttggccgaaagttctctagttacagaagataaggaattttcagcttatcctatttttggtgatcgtgaagaagagttgctgtaccataagacatacaagactatctatcatttacgtagtgctttggctaataaggatgaaaaggcggatctacgcttgatttatttggcattagcacatattatcaagtatcgcggaaattttttgatcgaaggagagattgagctaagtgatactgatatcgataaagtttatgcagatttttgtagatctttcaatgaattattcgatacagaagtccttcaagagatagaagttgaagcgatcttcaaagataaaactctttcaaaaactaaaaaggcggaagaattagttaaagttagtggagtcaagaaaaatcaagtagctcatcaatttttaaaaatgatggtaggtaatactgttaattttaagaaagtgtttaatttaacagaagatcaaaaattatcgtttggaactgactcatacgaagatgaattaaatgatttacttgctaaaagtgatgatagatatttagatgtttttgtagctgctaaaaaagtttatgatactgctatcttagccaatatcttaaacacaaaaaattctgttgctactaaaacaatattttcacaatcgatgatcgaacgttttaaggatcatcaaaaagatttaaaagaactaaagcaattgttcaaaacgtatttacctgaaaagtacccggacttctttggaaactcaaaagaagatggttatgctgggtatattgaaggtaaaacaaatgaggaaaaattttatacacataccaaaaaaatactaaaaaatattcctcaggctgcatcggtcttagcccaaattgatgttggaaactacttaagaaagcaacgtacctttgataatggtgtgatcccacatcagattcagttaaaagagttgttggcgatcatcgaaaatcaaggtaagtactatccatttttactagaaaataaagagaagatcgctaagatcttaacttttagaattccatattatgtcggaccgttagcacgtggtaatagtagatttgcttggctaaaacgagtaggaaaagagaagatcactccatttaactttgaaaacgtcgttgatctagagagctctgccgagagatttattgagcgaatgacacttaatgatctatatttacctgaagaaaaggttttacctaaacatagtatgttatatgaaaagtttagtatttttaatgaattagcgggaattcgttatattactgacaatggtgaaatgaaatttttagatgcgcaaactaaacaaagtatttttgaactctttaaacaagagcggactgttaaggagaaaaaggttttagacctgttaaaaactttaatgccttcagagcgagttgttgcgataaaaggaattgataacggtaaattcaatgcttcttttggcacatatcatgatctgtcaaagatgggctttaagactgaaaaaatagccagtgagagtaaccaagctcgttgggaagaaatcataaaaactttaaccatttttgaggatcgaaagctgatcaagtcacgattaagaaaatacgacgattttttgaatgaaaaagagatcggagctttgagtaagcgtaaatatactggttggggacgcttatcagctaaattgatcgatgggatctatgataaaaaaacacatcagacgatcttagattttttgatgaacgaagactacaatcaaaactttatgcaattgatcagtaatgataattattcatttaaaaaaattattgaggattcacaagtgatcaaagaagaggggagtttgactgaagtaattcaagaactacctggtagtccagcgatcaaaaaagggatcttacaaagtatcgagatcgtagatgaattagttaaagtcatgggcggtaatcctaaaaagatcgtagttgaaatggcacgtgaaacacaaaagacccatgggacaacgcgaagagaagcacgaattaaggaaattatcaaaaatttaaataaattgaaattaaatgaattacctaaagatcttccaagtaatgaagagctaagtgatgagaaagtatatctttattgcctacaaaatgggcgtgatatgtatactggagcaccattagatcttgataatctcagtcagtatgaagttgatcatattattcctcaaagtttcttaaaagatgattcgatcgaaaataaggtcttaactgctaaaatcgaaaatagccgtaaaaccaatggacttccgagcgtagagatagctaagaaaatgggcgcgttttggcgtagtcttttaaaagttggggcgatctcagaaaagaaatatcgtaatctccgtcggagtctgcatggtggcatgacagaaaaattaaaagaaacatttgttaaacgccaattagtagaaacccgtcagatcacgaagtatgttgcgcaaattttaaatagtcgctttaatgaagaaaaaaatgaagataaagtagcgatcgtaactttaaaagcacaattaacttcacaattcagaaaagattttgaattatataaagtaagagagatcaataatttgcatcatgcacatgatgcttatcttaatgcagttcttgccactttacttatgactagtttccctgaattagaaccagaatttgtttacggtaaatatcgaaagacgaagttcaagggccttggtaaggctactgccaaaaataatttatacaccaatattttacagctattaaaagaagagtccgcacaatattgggatactaaagaacgtgatctagcaacgatcaagaaaaacgtatatcaagctcaggtcaataaggttcgaaaagttgagcgccaaacaggatccttttacgacgaaacggtagctaaaaaatctgcctcacaaaagttgtttccccgtaaaaatggtctagatccagtaaagtatggtggctaccagcgagcaaatgaaggatattccttactatttcgagctgatatgctcaataaacgtggaaaaacaaaaagtgtaaaaacattggtaaaaattccaattattgaaagtgcgcaatatttggccgatcctactgagtatttagctaaacgtggatattataatgtttctgaacatagtttgctattacctaagtttagtttattggaaaataataatgggctgagaagatatttagcttccagtaacgaatttcaaaaggcaaatgaacttattttaccaaagcatctagttagattattgtattggagtcagtctaagcagagaaaagaagaactaaacaagcatcgtgctgaatttgcagaattgttcacatatattatggattttgctgataaatatgttgttgcccctaaaaattctgaaaaaatcaagaatatttatgagaataataaagattcttcggtagaagtactagggaagaattttattgaattgctaaagtatacagctgatggtgctgcaagtgactttactttctttgatactaaaattccacgtaaacgttataattcagcgggtgatctattagatggaacattgatctatcaatctaaaacaggtttatatgagactcggatcgatttgggggcgatctga

SEQ ID NO: 301 - DNA, 4134 bp, Lactobacillus brevis subsp gravensis ATCC 27305
gtggaaagtaatcatgatggggaacaagttaagtacacattgggattagacattgggacatcatcaattggctatgccgcaattgataagcatcaaaaacccattcgggcaaaagggaaacatgtcattggcgttcgactctttcaagagggtcaaacggcggctgataggcgggcatttcggacaacacgtcgacgactgaaacgccgcaagtggcgattgaatttactgaatcgactatttgatccttacttatcagaagttgatccaaacttcctgccacgactgaggcaatccaacctttcacccaaagatgacaataagcattttaatggatcaacgttatttcccgataaaacagatgcggcgttttatcgacagtatccaaccatgtatcatttgcgatatgctttaatgaccgagaagcgcaagtttgatattcgagaagtctatctagctattcatcatattgtgaagtatcgaggaaattttctgaattcagcaactgttgattcatttaaaacatcaaatattgattttaccagtcaatttgatcgtctaaatgagctgtacaggcaagttattctggatgagccatttcaaattaatatggatcaagttgatgagatgaccaataagcttttggataacgacgctttgaaacttgatactcaaaagcaggtcgcaaagttattgcctgtgatttataatgacaagccaattgataagcaatataccaggattgcaactgaattttccaaagctattcttggatataagacaaaactggacgtcattttaaacttagatactcaaaatgctaaggattgggtaattcggttggatgatgaagacattgatgacaagttgcctgcactcgtggagaacttggacgaatcccgccaggaaatagtgacgattattcgcgacttgtatgctcaaattacgttgaacgcaattgttcccaaaggaaagtcgttgtccgaatcaatggtggataaatataatgaccataaagaccatttagatttactgatgggattgattcatgaattgggggatgattcagccaaagggattaagttgagggaagcttatacacaatacgttggcaagtctgatgataaaacactgaatcaggatgatttttacgcagcaattaaaaagaatttggacgaagattccaaacgttctccaaaaattcagcgtcttattgaacaggcaagttttatgcccaagcagcggacatcggccaatggcgttatccctcaccagttgcatcaattggaattggaccgaattattgaaaaccaggggcgctattatccattcttaaaaaaaccgaacccaaacactcataaaccaaatggtggcaagtacaaattagatgaattggttgcttttcggattccatactacgtgggaccgcttatcacaaagcgggaccaagaaaaaacttcaggtgcagactttgcctggatgatacgtaaacccggacaagagggagaaattacaccttggaattttgatcaaaaggtagatcgaatggcttccgcgaataggtttattcgcagaatgacaaccaaggacagctatctggtagctgaagatgttttaccagatgccagtctgatttacgaaaagttcaaagctttgaatgaattaaatatgcttaaagtaaacgatagtcgacttagtccaagtcagaagcaggatctttttaacaatctatttaaaaagcaaaagactattcgaacaaaaaaactgcagacatatatccgaacaaattgggagttaccctctgtgatgatttccggtctggctgatccggataaattcaattcaagcttatcaacgtatattgattttcgggatatttttggagaaaaggtcgatgatccaaatcgtcaggcagactatgaagaaattatcgaatggtcaacggtttttgaagatagaaaaatctaccaggcaaagctgaatcagttggattggctgacagagccacagagaaaagcattattaacaaagcgctacacgggttgggggcgactatccaagaaacttttgacaggcttaaaagatcagaatggcgattcgattctggaccagctttggaaaacaaacgataactttatgcaaattcaatccagagatgagtttgccaaacaaattcatgacgagaatgccaagcagttccacgaggcaaataatgttgatgatattttggatgatgcatttacttcaccccaaaataaaaaggctattcgtcaagtagataaagtggttcaagatgttgtcaaggcggttgggtatgcaccggataaaattgcgattgaatttacaaggtcacttgaaaataatccgcaacggacggtttcacgtcaacgtcagctacaagcagcgtataagaatatacctagagaaatcatgaaatcgggattaatggcagagcttggatcggttgctgacagtaaaaaagtgctttctgataagctttatttatattttactcaaatgggtaaagatatgtatgaagacaagacaattaatattgataatttacccaattatgatattgatcacattcttccacaggcatttattaaagatgattcgattgacaatagggtactcattagtaaagaagaaaatgcaaggaagtccaatcgagtaccgcttaaattctttggcgcaaaaagaatgggcttttggaaagatcttttgaataatggcttgattagtaaccgcaaatttcagaacttgactaccgatcctgagaagattagtaaatatagcgcaaaagggtttattcatcggcaattagttgaaaccagtcaggttattcgattagtggctaatatcttaggaaatgaatatagtcaagccggtacaactattattgaagtgagtgctaaaatgaatcgtcaattgcgcgaagactttcacttgattaagaatcggaatgtgaatgattatcatcatgcaatggatgcatatttgactgcgtatgttggggattatttatatctccgttatcccaagttaaggccatattttgtctatggtgattttaagaaagcagaggatcaagatctcaatattagaaatttcaatttcttacatgatttgaaagataatgaaagcttggataaaattgttgattcagaaaccggcgaaattgtttgggagaagcacgggtcagttaagcaattaaaaaaggtttatcattataaattcatgttggtttcccaagaagtttatacaaggcaggatgcattgtttaaccaaacgatttatccggcttcagatgccgataaacgaaagttaatcccgattaagaatagcaaaccggtcgatgtctatggcggttatagcggaaatatagatgcctatatggcaattgttcgtgttcatggtaaaaaagaagataattacaaagtggtcgggataccgatgcgagctgtaactaagcttaaaaaggctgagaaggaaggccatgatagttaccttaatgctgttcatgaggttctaaagccccagttcaccaagaaaaagaaaaatcgcaagaccggtgaaattactgagacagtggatgaatttgatgtactcctcggaaaagtttattatcgacaacttattgttgacggcaataagaaatttatgctgggaagttcatcttaccagtacaacgccaaacagcttgttttatcggataaagcgatgcaggttttgagtaagaatggtaaggtgaaaagccaggatgaaaatcaaaatctaattgatgtttatgacgagattttggaaaaggttgatcaatattttgaactgtatgatcaaaggcattatcgagaatcgcttcataaaggaagaggcatttttgtgaatctgccactcagcaaccaatatgatggcagtaagttaactagttatggtaagtatgaaacaattgacgcaattttgaatgggttacatgcgaatgcaacaatgtcaaatttaagatatctaggtatttcttcaccatttggaaaaatgcaagcttcaaatggattaaccattgatcctgattcgattatttgctatcagtcaccaacggggctatttgaaagacaaattaaacttagcgatctttaa

SEQ ID NO: 302 - DNA, 4116 bp, Lactobacillus buchneri CD034
atgaaagttaataattatcatataggtctcgatattgggacctcatcaattggttgggtcgcaattggcaaagacggaaaaccgctgcgtgttaaagggaagacagcgattggcgcccggttgtttcaggaaggcaaccccgctgccgaccgcaggatgtttcgaaccactcgacggcgtctgagtcgacggaagtggcgattgaagttattggaggaaatatttgacccatatattacacctgtcgattccacgtttttcgccaggttgaaacaatccaatttgtcaccaaaagattcacgcaaagaattcaagggttccatgcttttcccggatttgaccgacatgcagtaccacaaaaattatccaaccatttatcatttacgtcatgcattaatgacgcaagataaaaaatttgatattcggatggtttacttggccattcaccacattgtgaaatatcgcggcaatttcttaaactctacaccagtagattcctttaaggcatcgaaggttgattttgttgaccaatttaaaaagttaaacgagttatatgccgcaattaatcctgaagagtcatttaaaattaatcttgcaaatagcgaagatattggccaccagttcctcgatccatcaattcgtaaatttgacaagaaaaagcaaattccaaagattgttcctgtcatgatgaatgataaagtaacggacagacttaatggtaaaatcgcgtcagaaattattcatgctattttaggctataaagcaaaacttgatgttgtcctacagtgcaccccagttgattccaaaccatgggcacttaaattcgatgatgaggacattgatgccaaacttgaaaagattttacctgaaatggacgaaaatcaacaatcaattgttgctatcctacagaacttatattctcaagtaactttgaatcaaattgttcctaatggcatgtcattatcagaatcaatgatcgaaaagtacaatgatcatcatgaccacttgaagttgtataaaaagctaattgatcaactcgctgatccgaagaagaaagccgtcttaaagaaggcatatagtcaatacgtgggtgacgatggtaaagtcatcgaacaagccgagttctggtcaagcgtgaagaaaaatttggatgattccgagctctcaaagcaaattatggatctgatcgatgcagaaaaatttatgccaaagcaacgaacatcgcaaaatggggtgattcctcatcaactgcaccaaagagaacttgatgaaatcattgaacatcaaagcaaatattacccatggcttgtcgagatcaatcccaataagcacgatctccaccttgcaaaatacaagattgaacaattggttgcttttagggttccatattatgttgggccaatgataacgccaaaagaccaggctgaatcagcagagactgttttttcttggatggagcgtaagggtacagaaactgggcagattaccccttggaattttgatgaaaaggttgaccggaaggcatccgcaaacagattcatcaagcgaatgaccaccaaagatacttatttaattggtgaggatgttcttccagatgaaagcttattatatgagaagtttaaagtcctcaatgagttgaacatggtccgggttaacggcaaattattgaaggttgctgataaacaagcgatattccaagatcttttcgaaaactacaagcatgtctcggtcaagaagctgcaaaattacattaaagccaaaacaggattacccagtgatccggagatttcaggtttatcagaccctgagcatttcaacaattctttgggaacatacaatgatttcaagaaattatttggtagtaaggttgacgaaccagatcttcaagatgattttgagaagattgttgaatggtcaactgtatttgaggacaaaaaaatcctgcgggaaaagcttaacgaaattacctggttatctgatcagcaaaaagatgttttagaatccagtcgttaccaaggttggggccggctttccaagaaactgttaactggaattgtcaatgaccaaggcgaacgaatcattgacaaactttggaataccaataaaaatttcatgcaaattcagtctgatgatgattttgccaaacggattcacgaagcgaatgctgaccaaatgcaggcagtcgacgtggaagatgtgttggcagatgcgtacacttctccacaaaataagaaggccatccgccaagtggttaaagtcgttgatgatatccaaaaggccatgggcggagttgcgcctaagtatatttctattgagtttacccgttcagaggaccgtaatccacgtcggacaatttcacgacaacggcaacttgaaaataccttaaaagatactgctaaatctttggctaaatcaatcaatcccgagttactttctgaactggacaatgcagcaaagtctaagaagggcctgactgatcggttgtacttgtacttcacgcaacttgggaaggatatctacactggagagccaatcaacattgatgaacttaataaatatgacattgatcatattttgccacaggcatttattaaagataattcactggataaccgtgtactagttttaacggcggttaacaatggtaaatcggataacgttcctctaagaatgtttggtgccaagatggggcacttctggaaacagcttgctgaagcaggcttgattagtaagcgcaaactcaagaaccttcaaacagatcccgataccattagtaagtatgcgatgcatggattcattcgtcgacagttggttgaaaccagccaagttatcaaactggtcgcgaacattttgggagacaagtatcgcaatgatgataccaagattattgaaattactgcccggatgaaccatcagatgagagatgagtttgggtttatcaagaatcgtgagatcaatgactatcatcatgcgtttgacgcctacttaacagcctttttaggtagatatttgtaccatcgatacatcaagcttcgtccatacttcgtctatggtgatttcaagaagtttagagaagataaagtcactatgcgaaattttaattttctccatgatttaactgatgatactcaagaaaagatcgctgatgctgagactggtgaagtaatatgggaccgcgaaaattcaattcagcagttaaaggatgtttaccattataaattcatgctgatttcacacgaagtttatacgcttcgcggcgcaatgttcaatcaaactgtttatcctgcatcagatgccggcaaacgaaaattgattccggtaaaagctgatcgaccggtcaatgtctatggtggatatagcggcagtgcggatgcgtatatggcaattgtcagaattcataataagaagggcgataaatatagggttgtcggtgttccaatgcgggcactggatcgtttagacgccgcgaaaaacgtcagtgatgcggactttgaccgggctctcaaagatgtattggcaccacagctcacgaagactaagaagagtcggaaaacgggagaaatcacccaagtcattgaagattttgagattgttttaggaaaagtaatgtaccgacaattgatgattgatggtgataagaagttcatgcttggaagctcaacctatcaatataacgccaagcaattggtcctctccgatcaatctgtcaagacacttgcaagcaaaggaagattagatcctctgcaagaaagtatggattacaataacgtctacactgagattttagacaaggttaatcagtatttttctttatatgatatgaataaatttcgtcacaagttgaatcttggtttcagcaaatttatctcatttcctaaccataatgtccttgatgggaatactaaggtgtcttctggcaaacgggagatcttgcaagaaatattgaatgggctacatgcaaatccaacattcgggaatttgaaggatgtcggcatcacaacgccatttggtcaattacaacagcctaatggaattctgctgtcagatgaaacaaagattcgttatcagtcaccaacaggcttattcgaaagaaccgtcagtctgaaggacttataa

SEQ ID NO: 303 - DNA, 4149 bp, Lactobacillus buchneri DSM 20057
attgaggggattaaagtggaaagtaatcatgatggagaacaagttaagtacacattgggattagacattgggacatcatcaattggctatgccgcaattgataagcatcaaaaacccattcgggcaaaagggaagcatgtcattggcgttcgactctttcaagaggggaaaacggcggctgataggcgggcatttcggacaacacgtcgacgactgaaacgccgcaagtggcgattgaatttactgaatcgactatttgatccttacttatcagaagttgatccaaacttcctgccacgattgaagtaatccaacctttcacccaaagatgacaataagcattttgatggatcaacgctgtttcccgataaaacagatgcggcgttttatcgacagtatccaaccatgtatcatttgcgatatgccttaatgaccgagaagcgcaagtttgatattcgtgaagtctacctggctattcatcatattgtgaagtatcgagggaatttcctgaattcggcaactgttgattcatttaaaacatcaaacattgatttcaccagtcaatttgatcgtctaaatgagctttacaggcaagttattctggaagagccatttcaaattaatatgaatcaagttgataagatgaccaacaagcttttggataatgacgctttgaaactggatactcagaagcaggtcgcaaagttattgccggtgatttataatgacaaacctgttgataagcaatataccaggcttgcaactgaattctccaaagctattcttggatataagacaaaactggacgtcattttaaacctggatactcaaaatgcaaaggattgggcaattcggttagatgatgaagatattgatgataagttgcctgcgctcgtggagaacttggacgaatcccgccaggaaatagtgacgattattcgcgacttgtatgctcaaattacattgaacgcaattgttcctaaaggaaaatcgttgtctgaatcaatggtggataaatataatgaccacaaagaccatttggatttgctgatggggttgattcatgaattgggggatgattctgccaaagggattaagttgagggaagcttatacgcaatacgttggcaaatctggtgataaaacgctgaatcaggatgacttttatgctgcaattaaaaagaatttggacgaagattctaaacgttctccaaaaattcagcgtcttattgaacaggcaagttttatgcccaaacagcggacatcggccaatggcgttatccctcaccagttgcatcaattggaattggaccgaattattgaaaaccaggggcgctattatccattcttaaaagaaccgaactcaaacactcataaaccaaatggtggtaagtacaaattagatgaactggttgcctttcgaattccatactatgtgggaccacttatcacgaagcaggatcaagaaaaaacttcaggcgcagactttgcttggatgatacgtaaacccggacaagggggagaaattacgccgtggaactttgatcaagaggtggatcgaatggcttctgcgaatacgtttattcgcagaatgacaaccaaggacagctatctggtagctgaagatgttttaccggattccagtctgatttacgaaaagttcaaagttttgaatgagttaaatatgcttaaagtaaacgatagacgacttagtataagccagaagcaggatctttttaacaatctatttaaaaagcaaaagactattcgaacaaagaaactgcagacctatatccgaacaaagtgggagttgccgtctgtgatgatttccggtctatccgatccggataaattcaattcaagtttagcaacgtatattgattttcgtgatgtttttggagaaaaggtcgatgatccaaatcgtcaagcagactatgaaaagattatcgaatggtcaacggtttttgaagacagaaaaatctaccaggcaaagctgaatcagttggattggttgacggagtcgcagagtaaagcattattaacaaaacattacacgggttggggccgattatccaagaagcttttgacaggtttaaaagatcagaatggcgattcaattctggaccaactttggaaaacaaacgataactttatgcagattcaatccagagatgagtttgccaaacaaattcatgatgagaatgccaagcagttccacgaggcaaacaatgttgatgatattttggatgatgcatttacttcaccccaaaataaaaaggctattcgtcaagtagataaagtggttcaagatgttgtcaaggcggttgggtatgcaccggataaaattgcgattgaatttacgaggtcacctcaagatcggcctcaacgaacattttccaggcagcgacagctccagagtacctatttaaatgtcgccaaagcgttgatgaaatctaatttgaaccaagaactcaaatcagtgatcgatagccagcaaacactaacggataagctttatctgtacttcacgcagcttggtcaggatatgtatacaggcaaagaaattaactttgatgaacttgttaattatcaaatcgatcatattctgcctcaagcctttattaaagatgattcattagataatcgggtattggtcagtgcaccgattaataatgcaaagtctgacaatgttccggtaaagaaatttggtgccaagatgggttacttctggaagcagttggcagaaaatcatctcatcagcaagcgcaaactaaataatttgacaacagatccagataagattggtaagtttactgctcagggcttcattcatcgtcagttggttgaaacgagtcaggttattcgattggtagccaacattttgggaaatgaatatggccatgatggcacgacaattattgaagtgaccgcaaagatgaatcatcaaatgcgaaaggattttgacttaatcaagattcgggatgtaaacgattatcatcatgcaatggatgcgtacctgactgcgtatgtgggtgattacttatatctacgctatcccaaattacgttcttattttgtctacggtgattttaagaagcttaaagatcagagcttgaagattagaaactttaattttctgcatgatcttacaaacgatgaagctggtgataagattgtcgatcaagaaacaggcgagattatctgggataagcacgagtcagttaagcaattaaaaaaggtttatcattataaattcatgttggtttcccaagaagtttatacaagacaggatgcgctgttcaaccaaacgatttatccggcttcagatgccgataaacgaaagttaatcccgattaagaataacaagccggtcgatgtctatggcggctatagtggaaatgtagatgcctatatggcgattgttcgtattcatggtaaaaaagaagataagtacaaagtggtcggggtaccgatgcgagctgttgccgaccttaaaaaggctgaaagcaaaggtcgtgataattaccttaacgctgttcatgaggttttaaagcctcaattcactaagaaaaagaaagatcgtaagactggtgaaattactgagatgatggatgattttgacgtactcctcggaaaagtttattatcgacagcttattgttgacggcaataagaaatttatgcttggaagctcaacttatcagtacaacgccaaacagcttgttttatcggataaagcgatgcaggttttgagtaaggatgacaaactgaaaaatcaggatgaaaatcaaaatctaattgatgtttatgatgagatcttggagaaggttgatcaatattttgaattatatgatattaacaaatttcgtcagaaacttcatgacggacgaaagaagtttattgaattaccagtagacaacgattttaatgggaaaaagcttatttcatacgggaaaagagcaactatcatttcaattctaaatgggcttcatgcgaatgctaccatgtctaatttaaaatatttaggaatttcttctccttttggtatgcttcaagttccaaatggcataatcttaagcccagcatcaaggatttgttatcaatcgccaacaggattattcgaaagaaaagttaagcttagcgatctttag

SEQ ID NO: 304 - DNA, 3516 bp, Lactobacillus cacaonum DSM 21116
atggctaaatatagtgtggggttagatattggaatttcttcagttggttgggcaattattgatattgagacaaaacaaattgtgaatcttggaagtagaatttttccatctggaaatgcggcaggaaatcaagaaagacgcggttttcgtgggataagacgattgattagacgtcgcaagaatagattaacagatttaaagaaattattgggagaaacatttttctctgatttaaaaaaaattgattcaaatggttatgaatattatgatatcgatttccaaattaacgctaatccttatgaattacgagttaaaggaataacggagaaactatctaaaaaagagttagcagttgtattacatcatatcattaagcatcgtggtatttcttatgacttaggagatttggaagatgatgggacaagcggagttagcgattataaaaattcaatcaatattaatagacaattacttcgtgaaaaaacggttggtcaaattcagttagaaagactcattgagtttaaccaggtccatggacaagttaaaaaggctgaagatgtttcattgttgaatgtttttccatcttctgcatatcgtgatgaagcaaataaaatcatgattaagcaacaagaattttattctgaaattacgaattcattcatggaacaagtggatcaattagttagccgcaaaagagattattttattggaccaggtaatgagaaatcacgtactgattatggaatatataaaagtgatggacgaacattagataatttgtttgctgaactcattggaacggataagattaatggtgaaaaaagagcatcagcatcaagtttgactgcacaggtttacaatttattaaatgatttaaataatttgcatgtttctaatacagaagatggcaaattaacaacaagcacaaaaaaagaaataatcaaagcagctaaaactacagatggagtttttggaatatcccaaatttgtaaaattattggttgcaaaaaagaggaaattactggatttagacaagataagtctgaaaaaaaagttattcatacattagcaggatatcgaaaaattaggaaagctttggcaactataaatattgaggcgaatgagttaaatccaactgtttttgaccaaattgccgatattttaactcttaatacggaaaaagcagaaatccgaaaacagttagacaaagtccagttagatataactgatgagatgaaagaactagttattgataagaataaagattttttagtagatgggcgagctacatggcatagtttttcctatcaaacattaaacatgcttattcctgaattattgaatactagtgaagagcaaatgacaatattaactcggatggggttaatgaaatcagataatgagaaataccgcggattgaaaaagatacctgctgaaaaaattgcatcagaaatatttaatccggttgttgcaaagtcaacaagagaagcaatcaaagttttcaatgcaatatctaaagagataggaaaaaataatattgagcatgttgttattgaattgcctcgtgatgataatgaagaagatgaaaaaaggaaaattcaaaagctacaaaaagctaatgagactgaaaaagaggctgctgataatctagtaaagcataaactaggaatttcggattcagcattaattgcacattaccgtaagtttaaaggactttcgcaaaaggttaggtattggtatcaacaagaaacttattgtccatattgtgggaaaataatcgaagcaacacaactaattaataataacgataattttgaagttgatcatattattccaatttccgttagttatgatgattcacaaaataataaagtgctagttcatagccaatgtaatcaagctaaagaaaaacaaactcctttgggttggataaataatggtggtggttttggtcaaagcaagaatgaatatactaatagggttaaaaataataagaagtattcaaaaaacaaagttgataatttgttaaatgagacagatcttactgatattattacgcaacgtagttttattcagagaaatcttaatgatacgagatatgctgcacggacagtattagatgagttttattcattttttaaatcaaatgatttaccgacaaaggtcaaagttgtacgtggaaaatggacttctcaaatgcgaagaaaatggaataatgttgggggactaaggaaaactcgtgatacacatcatcaccatgcgattgatgccagcattattgcaagtttcccactattgagagctttcgatagagcgataaaattgattgatgtcgataaagaaactggagaaatagtacaatatgggaaggcctctttaaatggggacgtaatcgaggaaaaatcagtgattcaggcacctattataaaaaacgagaagttcgaaaaacttgttgatgaaatctataattttccgttatttaaacaagttgagctggcaaataatattgaaaatccagaaaatccggtgaaatttagtcatcatgtcgataaaaaagcaaatcggacagttgctaatcaaacaatttatagtacacgtattaaaaaaactgaaaaaatagttcgtaaaaaggtaacggctaaagaagaagagtatgttatcggaactattaaagatatttatgatgtaactaactttgaaaaattcaaaaaactttatgatgaatcttctaaaaaagatgatatcaaatttttaatgcagaaaaatgatccaaaaacatgggagaaattagttgaaatcatgaatacctacccagattatgaagaaattagtcagttagatgggaaagttaagcgggttaaagtttcgccatttaaactttattttcgtgaaaatggcttcattactaaatatgctaaacacaataatggcccgaaagtagtaagcataaagtattatgattcaaaacttggaaatcatattgatataacaccagttaatgctaataataaggtaatcttacagagcttgaaaccttggagaactgatgtttattataataatgaaacacaacaatatgaactgcttggtttaaaatattctgatttaaagttcacaaaaggtgtttatggaattactcgagaagcgtatgaaaagcttaagtatggctatacagacggtgtacctgcttggaaaccaatcagcaaagagagtgaattcaagtttagtttgtatagaaatgatcgtgtaagaattattaatgaagccggtgaaaaaatagatctcctatttggttctagaaatgaaacatcagaaggatacgttgaaatgaagccaatttttaagacgaattttgatgatgcagaggaagctagtttttatggaaagacatcaaataagagattaatcaagaaaatggctagaaaagggtaccaaatttataaggtgaatactgatatcttaggtaatctatactataccgcgaaagaatcgaatgaacctaaattagatttatag

SEQ ID NO: 305 - DNA, 4089 bp, Lactobacillus casei str Zhang
atgacaaagttaggtaaaccatatggcattggagtcgatatcggctcaaactcgattggatttgcggctgtggatgagaacagtcatcttattcgattgaagggaaaaacggttattggggcaagactgtttgaagaaggaaaagcagcagcgaaacgccgagcaggtcgtaccactcgccgtcgtttgagccgaaatcgttggcgactcagttttttgcgtgatttttttgaatcgcatattacgcctactgacccgaatttctttatgcggcaaaagtactcggaaatctcgccgaaggataaggcccgttacaagtatgagaagcggctttttaatgatcggacggatgctgagttttatcagcaatattcgacaatgtatcatttgcgcaatcggcttatgactgatccaagcagagcggatgttcgcgagatttattttgccattcatcatattttgaaaagtcgcgggcattttttgacgccgggagatgccaaggatttcaatacaaacgatgtggcgttagacgagatttttcctgcattgcaggatgcctacgcccaagtttacccagatcttggcattacttttgatgaggacaaagagaatgagtttaaaacaattttgctgaatgaaatagcaacgtcaattgatacgcaacgagctttagtcaaactgttactggctgaagaagacgacaaggacatcttgaagcagcagaagcaggttttaaccgagtttgctaaagctgtggtcgggttgaaaaccaaacttaatctagcgttaggaactgaagttgatagttctgaagccactgcttggaacttttcattagggcagcttgacgataaatgggctggcattgaatcggctatgaccgatgaaggaacggaaattctggaccagattcgggatctgtatcgagcccggctccttaatggtattgtgcccacaggaaagacgctttctcaagctaaggttgatgattatacacaacatcatgaagatctccagttgtttaaagcctatttaaaacaacttgaagatgatggaacggctaaagcaatccgacagctttacgatcgctatatagacggtgacgatgctgcgccatttttgcgagaaaattttgttaaagcgttaactaaagacgtgacggctcatccaaacaccaagtctcctgaactgcttgaacgtttggcgcaaccggacttcatgctcaagcagcgcaacaaagcgaacggggctattccagtccaaatgcaacagcgggaattggatcagatcatcaaaaatcaagctgtttattacgactggctggctgcgccaaatccggtggaaaagcatcggaaaagtatgccttatcagttggatgaattgctgaattttcgaattccatattatgttggaccattggtgacggctaaagagcaaaaagcagcacaaggcggggtttttgcttggatggttcggaaagatcctgaaggtaatatcacgccttataattttgacgaaaaggtagatcgcgaagcttcggctaatacctttattcagcggatgaagacgaccgacacttacttgattggtgaagacgtgttgcctaagcaaagtttgctgtatcaacgctatgaggtgttgaatgaactgaataatgttcgtgttaataacgagaagcttagcatcgaacaaaaacaacaagttattcgagaactgtttgaacggcataatagtgtgacaattaaacaatttgccgaaaatctgcgagcgcatggtgattacgcccacattcctgaaattcgtggtttagctgatgagaaacgttttttaagttcactttctacgtaccgtcaactgaaaagtcttttacccgaggcaattgatgatccagccaaacaagccgatattgaaaatatcattgcgtggtcgaccgtttttgaagacgcagcgatctttaaaacgaaattgaaagagatcagttggctcggcagcgaagccatcacgaaactaagcaacattcgatatcgggggtggggccagttttcgcgcaagtttttaaatggtctgacccttggcaacgggcatactatcattcaagaattgctcctgtccactaacaacttgatgcagatactaacagatgaaacgctacaaaagaaaatgaccgagctgaacgctgataaattgaaaacagcgaatatcaatgatgcgattgataatgcgtatacatcaccaagcaataaaaaggcattgcgtcaggttcttcgggttgttgatgatattaaacgcgctgcggatggtcaagatcctagttggttgtacgttgaaaccgcggatggcggtggtacaccaggcaagcgcactcgtgcgcgtcaacatcaacttcaggaaatatacgcgaatgcggcccacgagctgattgatacggcagtccgcggtgaattggaagataagatttcagataaggccgatttcaatgatcgactagtgctgtatttcatgcaaggtgggcgtgatatctacactggtgcgccactaaatattgatcaactaagtagttatgatatcgaccatattctgccacaatcgctaatcaaagataactctttagataatcgtgtattagtgcacgctattatcaaccgagagaaaaacgcaacatttgcatcaaccatctatgctcaaaagatgaacgcgacatggcgtcaatggcatgaggcagggctgattagcggtcgcaaactgcgtaatctgcaaatgcgtccagatcaaatcgataagtacgcgagcggctttgttgcccgacaattggtggaaactcgacaaatcatcaagctgacggaacaaattgtagcagcgcagtaccctgataccaaaattatcgccgttaaagcaggtctttcacatcaattgcgggaagaactcgaattccctaagaatcgtgatgttaatcactaccaccatgcttttgatgccttcctagccgctcggattggtacctatttactcaagcgattccctaatttacaggctttcttcacgtacggcaagtttacaaaagccgacgtcaaaaagcttcgcgggttcaactttatccgtgatatcacacatgctgaagataaaattgtggcaaaggataccggcgaggttgtatgggacaaacaacgggatgttgatgagctggatcgaatctataactttaagcggatgttaattacgcatgaagtccgctttgaaacggcggatttgtttaagcagacggtttatggggccagggattcgaaggaggctggcgggtcgaagcagctcattccaaagaaaaaaggatatccagttgatatttatgggggctatttcagagagaacacggcctatcttgccgttgtgaaagtgaccaaaaagacagagacaatctttaaagttgtcaaaattgcaacttcccaggttgcagctttgaataaagcaagatcacggtcaactgctgaggagctttcagtacttactgaactcctaaagccaaaatttagcaaggtcgggaaaaatggtaagatcactgatacaccattcgaggttgtgcttccgcgagttccgcgtgaacaacttttctataatgcaaagtatggtttctttatggttaactcagataccatgtttcacaatttccaagaaatttgggtgtctcgttcagaccaaaaaattcttcaacaaattagaaaagccaagattgactatcctaatgttgatcaagatttagacaatctttttcacaatttagccgatcaaattgtcaaatattttgatttgtattctattgcagggtttaaagagaaaatcagtcaaagtcaaaatactttcaatgatttggcggttgatgatactgaccagagtgtaggtaagataacggtcattaatgaattgttaaagggagcacaagctaatggcatgacgggaagcctaaaagttttaaagataagtaccccatttggatttacgcaagataaaagtggtgttcttacaaaagatagttccatcatctatcagtcaccaacagggctttttgaacggtctgttcgcctaactgacctgtaa

SEQ ID NO: 306 - DNA, 4188 bp, Lactobacillus ceti DSM 22408
atgagtaaaaaatatcaaaacacaaagtattatgtagggcttgatatcggaacgtcgtctgttgggtgggctgtaacagacgcgaattatgagttattaaaagttaatggtcataagacatggggatcaagattattcacagaggctgaaacggcacttgaacggcgaacacaccgcgctactcggagaagactgcaaagaagaaaacaaagactggatttattagatgaattatttgctgaagaacttgctaaagtagatccacagtttttacttcgtttgaaggaaagtcagtatcatatggaagataaaagtacagatgataagtatgttttgtttaatgatcaaaatagaacagatggagaattttttacagagtatccaacgatttatcatttgcgtagtgaattaatgcaagggaaaaaagaggatatacgtgcagtatatcttgcattacatcatatcgtgaaatatcgtggccacttcttattacctggagataattatgatatgcaaggtaatttaagtgaactgattaagaggctgtttaaatttattgaagaaactttatttattgaagatcttggattgacggatgaaattcaatccaaaatagaagaaattttattgacaaagacaaaaactcgtcttgatcgccaaaaagaaattgtcaaactttttaatacaaaacatcaaaaattagatgataaacaaaaaaaattattagaagctatttttaaattatgtttaggtcttaaaggtaatatggttaatatttttggtgacaaaggtgaatatggaattgattttactgatgtcgaagataagaagaaaaaggtagaatttagtgctgattatgataataacattaatgactatgtagatttctttggtgaatattttgaattgttagaaattacgaaaaaaattaatgatacagttattttttctgaaattttagtcgatggaaaaggtttttctgaatctaaagtaatttcttatgaaaaacatcaacaagatttgcgcaaattaaagacactcttgaagagtctagataaaaccttggggtataaatacggagaaggattataccaaaaaatattacttgatgatgtaaaatctaattatgttaattattcaggaaattctcaaaaattaaaaaaatgtactaaagatgagttttatgggtttatcaagagtaagttaaattcagttaccaagaaagaaaaggtttctgaagctcaacaaaaagaaatcgctcagattctcgctgatatggaatttggtgattatctaccgctgcaacgtacaactgataatggtgttattccaaaccaattacacaaaaaggaattaattgaaattattgaacaacaaactaagtatcatgattttttcaatgatgtagatgaaaatgggctaactattaaagataagattatttcattaatgacttttagaataccttattatgtcggaccattgaatgattatcataaagttgctgatggaacaggacatgcttggattgaaaagaaaaaagacggtaaaatctatccttggaattttgatgagatggttgatacagaggctactgcagaaaaattcattaaaaatttgacgaataaatgcacctatttaaaaggtgaagatgtattgccaaaagaatcgaagctgtattctgaatttatgttattaaatgaacttaataatattaaaatagataatcaaaaattggatcctaaattgaagatgaaaatggtatcagagttgtttatgaaaaaaaacgaaaagataacgaagaaaaaaattgttgattacttacgctcaattggtcaagctaatggtaacgagatggttagtggaattgatcgggaaatcaaatctgatctgaaaactattcataaaattcaacattattaccaagacgcatcgctagaaatggcggaaaatattattcgttggaataccatttttaatgattctacttctgacatattaaaggataaaatcacaaaagcatatggtgatgtattaactcctggtcagattaaaggattgtctaatctagcatgtaaagattgggggaaattatctgaaaaattcttaacaggtattcgttgtgatgtgggagaatttaaaaatattagtattattcaagctatgcgagatactaataataacttgatggaattattatcgaataaatatgaatttatggataagattcaagaatacaataaagaatattatggtgattttaccttcaaagcagaaccctctattatggatgatttatatgtgggacccggtccgaaaagagctatttggcaagcggtacggattgttgaagaaattaagcggattatggggcatgatccagaaaaaatctttcttgaaacaacaagaactaatcgggcaccaaaggttaagaacactaaacgttatgatgcgttagaaaaaaagtatgagtccgttaaagagcacgaatatgcagaagtaaagaaagaatttgaaattgaaaaaaatgatagtttaaatataaagaagttatttctttattttacacaactcggacactgcatgtattctgacgaaaaaattccttataatgaattattcactaatcgttatgatattgatcatatttatccacgaagtaaaacaagagataactctatggacaatctcgtattggtgaaagcagaatgtaatagagataagaaagataattatccaattaagcttaaaacaaatattcaacagaaatgtcaggttcgttgggcatatttacgtgataaaaaacttattactgaagaaaaatataatcgcttagtgcgtaaaacaccattaactgaagatgaattgtcacaatttattgccagacaattagtgtttacatcacaatctgtcaaagcaacagcggaagtatttaaaaggttatatgaagattctaaaatttgttatgttaaagctgagaatgttagtgactttagatatggttcaactagaaaaatgagtaaagatgatcaaccgcaaccttttatcaaaaatcgcgatgtgaatgattttcatcatgcgaaagatgcttatttaaatattgtagtgggtaatgtatatgatgttaaattcacacaaaatccaacgagatttattaaagcaaataaagattatagtttgaattatatttttagatatcctgtgaataaaaaaggtgagaatgtttgggatccagaacaatcgatgaagatagtggaaaaaacattgaaaagcaatgatgtgcgtgtcactaaattagtgaagccaatcactagtccaatatccaacgaaactcttcataaagcattaaaatgtaaacctggttcttatttaccacgtaaatcttctaaaggaacacccttggcagatgtgactaaatatggtggatatgaaaagattaaaaatgcatattacagtatttataaatatacctatatgaagaaaaaagaatgtatggaagagtttctacttgtacctataccaattcatttggtgaataacgatgaagaattaccaaaatatataaacgataagatagccgaaagagcaaaaaagaaaaaattggaaacagtcgagtgtattgtaaaagaattatatcaaggaactttagttagaataaatgggtatgattatcgtattgcaggaagttcgggaaaacaattcgaattgcataatgggattaatctgattgttgaaccttgggttgaaaaagttctgaaagaaacagataaattcgtgcgaaaatctaattcaaaattagataaaaaacaacaaaaagagaatacaactgaaactctgattgaaaaacaattaaatgatgtatttgaatatctctgtcggaaattaaatcaaggcatattcaaaaacaacaaacatacattacctgctaaactgttgggggatagtattcaaaaacgttttgaagatgctagtattgaagatgaatttgaggttataaaagaattgataagtgctatagcgaagaatcctcagaatttcaaaacgattcaaaaagtactagatatatccggcagttcgataccaagatttaatttaaagcttacaaaaaataatgtagacgagtttattattaaaaatgaatcggtgactggtttatttacacatgagaaagttatttttagaaaatag

SEQ ID NO: 307 - DNA, 3360 bp, Lactobacillus coryniformis torquens
atgggctatcgaataggcttagatgtggggattacgtcaactggttatgctgttttgaagactgataaaaatggactaccatataaaattttaacactagactcagtaatttatccgcgtgctgagaatccacaaacaggggcgtcattggcggaaccgcggcggataaaacgaggattgcggcgccgtacgcggcgaaccaaattccgtaagcaacgaacgcagcaattatttatacatagtggcttattgtctaaacctgagattgaacaaatcttagcaacaccacaagctaaatattcagtctatgaacttcgggtagcgggtctcgatcgtcgattaactaatagtgaattattccgcgttttgtacttttttatcggacaccgtggatttaaatccaatcgtaaagccgagttaaatccagaaaatgaagcagataagaaacaaatgggccaacttcttaattcgattgaagaaattagaaaagctattgctgaaaaaggctatcgaacagttggtgagttatatctaaaagatcctaaatataacgatcataaacgtaataaaggctacattgatggctatttaagtacgccaaatcggcaaatgttagttgatgaaattaagcagatcttagataagcagcgcgaattaggcaatgaaaaactaactgatgagttttacgcaacttatttactgggcgatgaaaatcgagctggtatttttcaagcacagagagactttgatgagggacctggtgctggaccttatgccggtgatcaaataaaaaaaatggtgggtaaggatatttttgaacctaccgaggatcgtgcggctaaggcaacctatacttttcaatattttaatttattgcagaaaatgactagtttgaactatcaaaatacaactggagatacttggcatacattaaatggacttgatcgacaggcgattattgatgctgtttttgcaaaagcagagaaaccgactaagacgtataaaccaaccgattttggcgagttacgtaaattattaaaattacccgatgatgcacgttttaatctagttaattacggtagtttgcaaacacagaaggaaattgaaacagtagagaagaaaaccagatttgttgattttaaagcctatcacgatttggtgaaagtattaccagaagaaatgtggcaaagtcgacagctattggatcatattggaacagcattaacgttatattcgagtgataaacggcgccgacgctattttgctgaagagttaaatttaccagctgaattaatcgaaaaactcttaccacttaatttttctaaatttggccatttatcgattaaatcgatgcaaaatattattccctatcttgaaatgggtcaagtttatagtgaggctactactaatacgggatatgatttccgtaaaaaacagatttcgaaagatacgattcgcgaagagattaccaatccggttgttcgtcgtgcggtaacgaaaacaattaaaattgttgagcagatcatccgtcgttatggtaaacctgatggcattaatattgaattagcgcgtgagttaggacggaactttaaggaacgaggcgatattcaaaaacggcaagataaaaatcgccagactaacgacaaaattgctgctgagctaacggaattaggtattccagtcaatggacaaaatatcatccgttataaattgcacaaagaacagaatggtgtcgatccttacacaggtgatcaaatcccatttgaacgtgcatttagtgagggttatgaagtcgatcatattattccgtacagtattagctgggatgatagctacaccaataaagtgttgaccagtgcaaaatgtaatcgtgaaaaaggcaaccgaattccgatggtctatttagcaaataatgagcagcgtttaaatgcgttaaccaatattgctgataacattattcgtaattctcgtaaacggcaaaaacttttgaaacaaaaactaagcgatgaagaattaaaggactggaagcagcggaatattaacgatacacgttttattactcgcgtactatataattatttccgccaagcaattgaatttaatccagagttggagaaaaagcaacgtgttttaccattaaatggtgaagtcacttcaaaaattcgcagtcgctggggatttcttaaggtgcgcgaagacggtgatttgcatcatgcaattgatgccactgttattgcagcgattacgccaaaatttattcagcaagtaactaaatatagtcaacatcaagaagttaaaaataatcaggctttgtggcatgatgctgaaatcaaagacgctgaatatgcagctgaagcgcaacggatggacgctgatttatttaataagattttcaatggttttccgttaccttggccagaatttctggatgaattgttagcccgtatttctgataatcctgtagaaatgatgaaaagcagaagctggaatacgtatacaccaattgaaattgctaagttaaagcctgtatttgttgttcgtttggctaaccataaaatctctggtccggcacatttagatacaattcgtagcgctaaattatttgatgaaaaaggtattgtgttgagtcgagtcagcatcactaaactaaagataaataaaaaagggcaagttgctaccggggatggtatttatgatcctgaaaatagtaataatggggataaagttgtttattcagcaatcagacaagcgttggaagcgcacaatgggtctggagaattagcttttccagatggttatttagaatatgtggatcatggcactaagaaactagtgcgtaaagttcgagtggctaagaaagtttcgctaccagtacgattgaagaacaaagctgcagcggataatggctcgatggtacggatcgatgtctttaatactggaaagaaatttgtatttgtaccgatttatattaaggatacagttgagcaggtactaccgaataaggcaatagcgcgtggaaaatcattatggtatcaaattactgaaagtgatcaattctgtttctctctatatccaggtgatatggtgcatatagaatccaaaacgggaatcaaaccgaaatactccaataaggaaaataatactagtgttgtaccaattaagaatttttatggttactttgatggagcagacattgcgacagccagtattctagttcgtgctcatgatagttcctataccgctaggagcattggtatcgctggattactaaaatttgaaaaataccaagtcgactatttcggtcgctatcataaagttcatgaaaagaagcgccaattgtttgttaagcgagatgagtaa

SEQ ID NO: 308 - DNA, 4107 bp, Lactobacillus curvatus CRL 705
atgagtcgtccgtataacattggtttagatattgggactagttcaattgggtggtcagtggttgatgaccaaagtaagctggtcagtgtaagaggtaaatatggttatggggttcgtttatacgatgaaggacaaacagctgcagaacggcgcagctttagaacaacacgtcgccgattaaaacgacgtaaatggcggttaggattgttaagagaaatctttgaaccctatatcacgccgattgatgatacttttttcttacggcaaaaacaatcaaacctaagtccgaaggatcagcgaaagttatatacacaaacaagtttatttaatgatcgaacagatcgggcattctatgacgattatccaacgatttaccatttaagatataggctaatgaccgagaaacgtcaatttgatattcgcgagatttatttagcgatgcatcatattgtgaagtatcgcgggcactttttaaatgaagcgcccgtctcatcctttaagagtagcgaaattaatttagtggctcattttgacagactaaacacgatttttgctgacttgttcagtgaatctggctttcaactagagacggataaattggcggaggtcaaagcgctcttattggataatcaacaaagtgctagcaatcggcaaagacaagcattatcactgatttatacgccaagtacgaataaggcagttgaaaagcagaataaggcgattgcgacagaattattaaaagcaatcttggggttaaaagcgaagtttaatgtgcttactgggatcgaagccgaagatgttaaagcatggacactcacttttaatgcagaaaactttgatgaagaaatggtcaagttagagagtagtcttgatgataatgcccatcaaattatcgaaagcctacaggaactttattctggtgttctattggcgggaatcgttcccgaaaatcaatcattgtcgcaagcgatgatcacgaagtatgacgatcatcaaaagcatttaaaaatgctaaaagcggtacgggaagcgttagcacctggagaccgacagagattaaagcaggcttatgaccaatatgttgatggtcaagaaaatacgaaggcctattcgaaggaagatttttacggagatatcacaaaagccttaaagaacaacccagatcatccgattgtgagtgaaattaaaaaattaattgaacttgatcaatttatgccaaaacaacggaccaaagataatggggcaatcccgcatcaactacatcaacaggaattagaccggattattgagaaccaacaacaatactatccctggttagcggaacttaatcccaattctaaacggcaaacagtcgctaaatataaattggacgaattagtggcctttagagtaccatactatgtggggcccctgattacggctgagcagcaacgacaaagctccgatgcgaaatttgcgtggctgattcgtaaagcagaaggccggattacaccgtggaacttcgatgataaagtggaccgtcaagcatccgctaatgaattcattaagcgcatgacaacgactgatacttatttattggctgaagatgtactccctaaacagagcttaatttatcaacggtttgaagtgttgaatgaattaaacggacttaagattgatgaccaaccgattacgacggagttgaaacaagcaatatttacggatttatttatgcaaaaaataagtgtaacagtgaaaaatattcaggattacttggtatcagaaaagcgctatgcaagtcgtcccgcaattactggtctatccgatgagaacaaatttaatagtcgattaagcacgtatcatgacttaaagatgattgttggagatgcggttgatgatgttgataaacaagccgatttggaaaaatgtattgaatggtcaacgatttttgaagacggcaaaatatatagcgccaaattgaatgaaatcgattggttaacggatcagcaacgtgtgcaattagctgctaaacgctaccgcggttggggtcgtttgtcggctaaattattaacgcaaatcgtcaatgcgaatggacaacgaattatggacttactctgggatacaacggataacttcatgcggattgtgcactctgaagactttgataaattaattactgaagctaatcaaatgatgctagctgaaaatgatgtacaagatgttatcaatgatttatatacgtcaccacagaataaaaaagcgctccgccagattctgcttgttgtcaatgacattcaaaaggccatgaaaggccaggcgccagaacggatattgattgaatttgcgcgcgaagatgaagtgaattcacgactttcggtgcaacgtaagcgccaagttgaacaagtctatcaaaatatcagcaatgaattgctaaataatactgaaatcagaaatgaacttaaggatttatcgaattctgcattgagcaatacgcgcttattcttgtacttcatgcagggtggtcgggatatgtatacgggtgattcgttgaatattgatcgtttatcgacgtacgatattgatcatattttgccacaatcgtttattaaggataactcactagataatcgggtattagtttctcaaaaaatgaatcgtagtaaagcagatcaagtaccgactgactttacaagtgtcgaacttggacaaaagatgcagattcaatgggaacagatgttgcgagctgggttaattaccaagaaaaaatatgataatttaacgttaaatccggatcatatcagtaaatacgccatgaagggctttattaatcggcaattagtagaaacacgtcaagtcattaagttagcaacgaatttattgatggaacagtatggtgaagataacattgagttaattactgttaagagtgggttaacccatcaaatgcgaacagaattcgattttccgaagaatcgtaatctaaataaccatcatcatgcattcgatgcttatctgaccgcattcgttggtctgtatctattgaagcgctatcctaaattaaaaccttattttgtatacggtgagtatcagaaggcaagtcagcaagataagtggcgtaactttaattttctaaatggtctaaagaaagacgaattggttgatgaaaatactgaagcggttatttgggataaagaatccggtctagcttacttgaataaaatatatcagtttaagaagattctagtgacccgcggagtgcatgaaaattcgggagcactatttaatcaaacgctctatgcggctaaagatgataaagcaagtggtcagggcgggaagcaattgattccagctaagcaagatcgatcaactgcgctctatggtgggtactcagggaagaccgttgcctacatgtgtattgtacgcattaaaaataaaaagggtgatctctataaagtctgtggtgttgagacgagttggttagcgcaacttaaacaactgacggatgaagattcacaaaaagcattcttagagcaaaaaattagtccgcaatttacaaaagtgaagaaacaaaaaggtaatatcattgaggccgtagaagaattcgaagtcattgcaccacatatcctaatcaatcaacgtttcttcgataatggtcaagaattgacattgggctctgcgacgtataaacacaatgagcaggaattgattcttgataaaacggctgttaaattattaaatggcgcgctacctttaacacagtctgaagaacttgctgaacaagtttatgatgaaatcttagatcaagtgatgcactatttcccactgtatgatactaatcaattcagagctaaattatctacgggtaaagcagcctttatgaagttaccatggaagagtcaatgggatggtaataagatggtgcaggttgggcaacaggttatattggatagaattctaattggattacatgcaaatgctgcgatgagtgatcttaaagtattgaaaatgaccacgccatttggaatgatacagcaatccacaggaattacactgtcggctgatacccaaattatctatcaatctccaaccggtttattcgaacgacgagtagctttaagggatttataa

SEQ ID NO: 309 - DNA, 4284 bp, Lactobacillus delbrueckii subsp lactis CRL 581
atggctaagcccaaagattatacaatcggccttgatattggtactaattccgttggctgggttgtaactgacgaccaaaacaatattctgcgaattaagggtaagaaagcaatcggtgcccgtttattcgctgaagggaaagtggcagcagaaagaagaagctttagaacgactagacgccgtctctcaagaagaagatggcggattaaactgctggaagagctctttgataaagaaattgccaaggtagacccgagtttctttgcaagactgcacgaatcttggatttcacctaaagacaagagaaagcgctactcagcaattgtctttcctagtccagaagaagataaaaagttccatgagtcatacccaacgatttatcatttgcgcgacaagctgatgaaggatgatcagaaacatgacattcgggaaatctacattgctgtgcaccaaatgattaaagcacgcggtaatttcttgcatgatgaatccgtagaaacttatcgttcagggatgagttcattgggtggccgaagcgaaagaaccattttaagcgttcaaactctggaagagttgaatgatctctttgctgaaaatgaaggcacggaggaagccaaattaaatgttgcttcagctgagcagattaatgacatcctcaccggtggccatttgaatgctgacagccaaaaagagattggtaaccttttgttgccaagcagcttcccaagtttcgatgacaaagcgaaggaaaagcaggtcaagaaactgatcaaaaatgtggcaacgaatatttctaaagcctggttgggctataaggcggatttctcaactattctgaatctcgccaatgttgacaaggatcaaaagaagatctttgcttttgctttacaaggcggggatgaagaagacaaagtacaagaattggaatccttgttggaacaaagccaaactgatattgtggatcgccttattgaaattcggcatgctattgttctgagtgagattgtcccagtcggaatgaccttgtctgaagcgatgatcgataagtatgatcagcataaagaagacttgattactttaaaggctgttattcggaataccaaggacaaaaagaaagctgccaaattacaagcaatttatgacttgtacgtcaacaaccgccatgcagatttggcaaaagcaatgaagttgactggaattaagaagagaagcgaactgcttgatcctgaggaactcaagaaagcaatttccagtttgttggatgactctccagaagctgttgaaattaagcaaatgctcgaggaaaagacctttttgcctttgcaaagatcaaacaacaatggtgtaattccaaaccagcttcatcaagtagagcttgatgagatcatcaagaagcagagtaagtactacccattcttggctgagaaaaatccagatgaatctgaagaagcccaaaagaaggctccaactaagttggatgcattgttgactttccgcgtgccgtactacgtggggccgatgattaccaaagaagaacaggaagcacaggacggccacagctttgcctggatggttcgtagagatcctcaagaccatgaggcgattactccatggaactttgagaaaaaagttgataagatggcttctgctactcagtttattaagcgtatgacaacaaaagatacttatttgcttggtgaagatgttttgcctgcatcaagcttgaagtaccagttgtttacggtcttgaatgagctgaacaatttacgggttaatggtaagaagctgactagtgatgaaaaagaacaagtgattgaaggcttgttcaagaagcagaagactgttaaagctgacaaatttgtcaaatattggcaagcaaagcatataggcgctgatattaaagttaaaggcctttcggatccgtcaaagttcaactcgacaatgtcaacctatatcgactttaagaaaatctttggtgatcagcttaatgatgtaaatcggcaaaatgattttgaaaagatcattgagtactcaacgatctttgaagaccgtaagattcttgaagacaagttacgggctgattttgcttggctgagcgaagaacaaattaagcaactttgccgtctgcgcttgcaaggctggggtcgtttgtctgacaaattgttgactcgtttgacagatgctgatgggcaaaatgttcttgaacgtctttggaatagcaatgacaactttgttcagattgtcagtgatccaaacatcaaggctaagattgaacaagaaaatcagaagctcctgcgtgatggccagtctgatgatgcagtagaaagtattttggatgatgcatatacttctcctcagaacaagaaggctatccgtcaagtaatgcgcgttgttcacgatattgtcaaggcatgtgacggcaatgtaccagcgaagtttgctattgaatttgctcgctcgcaagaggacgatccaaagagaactactgctagagtaaatcaaatgcagaagatctacgatcaaatcagtgatgaagtggtcagccagggcgtcaaagagcagcttagtggaatgaagtcactcaaagaccgctactacctatactttatgcagggcggcagggatgcttatactggtgcgaaactgaatattgaccggctgtcagattacgatattgaccacatcatgccgcagtctttcgttaaagatgattccttagacaaccgagttttggttgcgagagcagtaaacaatcaaaagtctgataaagttcctgctttgctctttggcaataaagtggttgctgatttaggaattactgttcgagaaatgtgggacaaatggcaaaagctcgggatgatttccaagagaaagttgagtaatcttctcactgatccggatgctctgacagaatatagagcacaaggctttattcggcgccaattggttgaaactagtcaagttattaagttgacggcgactattttgcaaagcgagttcccagacagcaagattattgaagttccagctaaatataactcgattgtgcgtaagcaatttgatttgtacaagagccgtgaagttaatgactatcaccatgctatagatgcctacttaagtacgattgttggtaactatctctaccaagtttatccaaacttgcgcaggatgtttgtctacggtgagtttaagaagtttagttctaatgctgaagaatcagcctatgatgtggttagacgcgttaagtcaatgaacttcttggatgatttgcttcgtggtacacatggtgacaatatttactgcagaagtactggtgaaattgtattcaacaggaacgatattatctctaagcttaagcaagcatactcttttaagcagatgctggtaacgcaggaggtctttactaagaaatcagccttatttgatcaaacggtttacccgtcaccagaaagagactcgaagaagcggtctggtttaattcctagaaagaagggaatggataccgagatctacggtgggtacagtggtaataaagatgcctactttgtcttggcagaggctgtaaaggaaaaaggacacacattgcagatcgtcggtgttccgattcgtgcgttaaacactctgaagaattctgcaaactattctgaaaagctgttagaaattattaagccgcaggtaatgtttaacaaggatactggtaaacctattaagggaatcaaggatgtcaaaattttaatggacaaaattccatgtcgtcagcctgttttggaaggtgaatcttattatatgcttgccagttcaaaatataggtatagtctcaaacaaatttccttaagtcaaatgtcaatgaagtacattcttgactatattgacgatccgaattttaataaacatgaaatgattaacattgatcaacaagacgaaaaggaatgtttgctctcagtttatgatgaaatcttagaaaagatggacaaatatcttccgctattcgatattagaagcttccgtaagaagttgcatgatggcagggatgcttttattgctttgccagtcgcaagcgaagaaaaaaagcctggtaaagttgatgttattagaaaggtcttgaaaggtcttcatgcaaacgcagatataacaaatttggctgaattgggctttggcacagcagcattaggtgctttagtgtcaacaggtggaattaagatttcagatgatgctgtattcatttatcaatcaccaactggattattcgaaagaagagtcaaggtctctgatttactgaaatag

SEQ ID NO: 310 - DNA, 4297 bp, Lactobacillus delbrueckii jakobsenii DSM 26046
gcgaaataaagagaaaaagaagggaaaaagaaaaatggctaagcccaaagattatacaatcggccttgatatcggtactaattccgttggctgggttgtaactgacgaccaaaacaatattctacgaattaagggtaagaaagcaatcggtgcccgtttattcgctgaagggaaagtggcagcagaaagaagaagctttagaacgaccagacgccgtctctcaagaagaagatggcggattaaactgctggaagagctctttgatgaagaaattgccaaggtagacccgagtttctttgcaagactgcacgaatcttggatttcacctaaagacaagagaaagcgctactcagcaattgtctttcctagtccagaagaagacaaaaagttccatgagtcatacccaacgatttatcatttgcgcgacaagctgatgaaggatgatcagaaacatgacattcgggaaatctacattgctgtgcaccaaatgattaaagcacgcggtaatttcttgcatgatgaatccgtagaaacttatcgttcagggatgagttcattgggtggccgaagcgaaagaaccattttaagcgttcaaattctggaagagttgaatgatctctttgctgaaaatgaaggcacggaggaagtcgaattaaatgttgcttcagctgagcagattaatgacatcctcaccggtgaccatttgaatgctgacagccaaaaagagattagtaaccttttgttgccaagcagcttcccaagtttcgatgacaaagcgaaggaaaagcaggtcaagaaactgatcaacaatgtggcaactaatatttctaaagcctggttgggctacaaggcggatttctcaactattctgaatcttgccaaggttgacaaggatcaaaagaagatctttgcttttgctttacaaggcggggatgaagaagacaaagtacaagaattggaatccttgttggaacaaagccaaactgatattgtggatcgccttattgaaattcggcatgctattgttctgagtgagattgtcccagtcggaatgaccttgtctgaagcgatgatcgataagtatgattagcataaagaagacttgattactttaaagtctgttattcggaataccaaggacaaaaagaaagctgccaaattacaagcaatttatgacttgtacgtcaacaaccgccatgcagatttggcaaaagcaatgaagttgactggaattaagaagagaagcaaactgcttgatcctgaggaactcaagaaagcaatttccagtttgttggatgactctccagaagctgttgaaattaagcaaaggctcgaggaaaagacctttttgcctttgcaaagatcaaacaacaatggtgtaattccaaaccagcttcatcaagtagagcttgatgagatcatcaagaagcagagtaagtactacccattcttggctgagaagaatccagatgaatctgaagaagcccaaaagaaggctccaactaagttggatgcattgttgactttccgcgtgccgtactacgtggggccgatgattaccaaagaagaacaggaagcacaggacggccacagctttgcctggatggttcgtagagatcctcaagaccatgaggcgattactccatggaactttgagaaaaaagttgataagatggcttctgctactcagtttattaagcgtatgacaacaaaagatacttatttgcttggtgaagatgttttgcctgcatcaagcttgaagtaccagttgtttacggtcttgaatgagctgaacaatttacgggttaatggtaagaagctgactagtgatgaaaaagaacaagtgattgaaggcttgttcaagaagcagaagactgttaaagctgacaaatttgtcaaatattggcaagcaaagcatataggcgctgatattaaagttaaaggcctttcggatccgtcaaagttcaactcgacaatgtcaacctacatcgactttaagaaaatctttggtgatcagcttaatgatgcaaatcggcaaaatgattttgaaaagatcattgagtactcaacgatctttgaagaccgtaagattcttgaagacaagttacgggctgattttgcttggctgagcgaagaacaaattaagcaactttgccgtctgcgcttgcaaggctggggtcgtttgtctgacaaattgttgactcgtttgacagatgctgatgggcaaaatgttcttgaacgtctttggaatagcaatgacaactttgctcagattgtcagtgatccaaacatcaaggctaagattgaacaagaaaatcagaagctcctgcgtgatggccagtctgatgatgcagttgaaagtattttggatgatgcatatacttctcctcagaacaagaaggctatccgtcaagtaatgcgcgttgttcacgatattgtcaaggcatgtgacggcaatgtaccagcgaagtttgctattgaatttgctcgctcgcaagaggacgatccaaagagaactactgctagagtaaatcaaatgcagaagatctacgatcaaatcagtgatgaagtggtcagccagggcgtcaaagagcagcttagtggaatgaagtcactcaaagaccgctactatctgtactttatgcagggcggcagggatgcttatactggtgcgaaactgaatattgaccggctgtcagattacgatattgaccacattatgccgcagtctttcgttaaagatgattccttagacaaccgagttttggttgcgagagcagtaaacgatcaaaagtctgataaagttcctgctttgctctttggcaataaagtggttgctgatttaggaattactgttcgagaaatgtgggacaaatggcaaaagctcgggatgatttccaagagaaagttgagcaatcttctcactgatccggatgctctgacagaatatagagcacaaggctttattcggcgccaattggttgaaactagtcaagttattaagttgacggcgactattttgcaaagcgagttcccagacagcaagattattgaagttccggctaaatataactcgattgtgcgtaagcaatttgatttgtataagagccgtgaagttaacgatttccaccacgctatcgatgcctacttaagtacgattgttggtaactatctctaccaagtttatccaaacttgcgccggatgtttgtctacggtgagtttaagaagtttagttctaatgctgaagaatcagctcatgatgtggctagacgcgttaagtcaatgaacttcttagatgatttgcttcgtggtacgcatggtgacaatatttattgcagaagtactggtgaaattgtattcaacaggaatgatattatctctaagcttaagcaagcatactcttttaagcagatgctggtaacgcaggaggtctttactaagaaatcagcgttgtttaatcagacagtatacccgtcaccaaagagagatggaagtaagagatctggtttgattcctcgcaagcggggaatggatccggaaatttatggcggatatgctcataatcaagattcttattttgtgttagctaaaattgaaaaagttaagggttataccttgcaaattgttggggtacctattcgatctttagaaataataaataaggcagaagatttctcaactgctttgttggacattataaagtcaaaggtgatgtacaacgaaaaaacaggtcaacctaagagaggaattaagaatgtagagattttagttaataagcttccctatcgtcaaccgattttagaaaaagatgtaagttatatgttaggtagttcagcctacaaatataacgtaaaacaaattacgcttagtcggcagtcgatgaaatacattcttgattacatcgatgatcctaattttacgaagcatgaaatgacaatgattgatgagcaaaatgaacgagaatgtttattatccgtttatgatgaaattttagaaaaagtagataagtatttgcctttgtttgacggtaataaattccgagaaaaactgcactcagctagaaaagaatttgtttcattatccgttgatgatgaagctagtgcaattgaaaagattctgcgcggattgcatgctaattctgagatgccaagtttggaaaacttaaaaattaaaccagcattgggctttttccaaatgaaaaatggtattacgctttcaaatgacgcagttcttttgtatcaatcaccaactggattattcgaaagaagagtcaaggtctctgatttactgaaatag

SEQ ID NO: 311 - DNA, 4092 bp, Lactobacillus diolivorans DSM 14421
atgagaggaaattatcacatcggtctcgatatcgggacatcttcaattggttgggcggtaatcgatgacaacgccaaggtcatgcgtgccaaggggaaaacagcgattggcgcgcgactgtataatgaaggtcaaactgccgcggatcgtcgactgtttcggacaacccgccgtcgactcaatcggcgaaagtggcgactaaagctgttggatgaaatttttgatccatacataacaccggtagatgcggccttttttgctcggttgaagcaatcaaacttatcacccaaggatcagaaccgcgactggacgggatcaatgttgttcccagatcgcactgatcgtaaatttcacaaggattatccgacaatttatcatttacgtcacaaattgatgactgaagatcaccaatttgatattcgtgagatttatttagcgattcatcacattgttaagtatcggggaaactttttaaacactacgcctgtgagttcatttagtgtctcagacgtaaaattcgatgaacaatttgaccggttgaacgaattatacgcggcggtttcacccgacgaaccgtttgcgattaatggcgataacagtaaagcaattgaaaccctgcttcttagtgacgagacaaaaaagttcgacaagcagaaacagtcagctaagttgatcttgtcagaaaccggcgataaagcgctcgataaagaaaatacaaaagtggcgactcagattagtaaggccattcttggctataaaacgcaactcgacgtcctgctcaaatacgatgcaattaattcttcggcttggaaaattgagctggacgatgaaaacattgacgatacgttgcctggcttgttatcccagttggatgagaatcgtcaggaaatggtttcaatcattcagaatctctatgcgcaagttactttaaatcagattgtgcccaatgggatgtcattgtctgaatcaatgattgaaaaatataacgctcaccgtgatcacttgaagctactcaaacagctcgaggataagattgacgatccgaaaaagaaaaagggcttggaagccgcctatgacgcttatgttggtaaaaacatgaaagtggccaatcaagatgtcttttacgccagtgttaaaaagaacttggatgattcagatcttgctaagcaaattgctgacctcattgaggcacaaaaatttatgccaaagcagcgaacttcgcaaaatggggttattccgcatcagcttcatcaacttgaactggatcaaattattgaaaaccagagtaagtattatccatggttgacggctgctaatccaaatccaaaacgaattcaccaagctaaatacaaacttgatgagttggttgcgttcagaattccatactacgtcggcccattggtaacccctgaagagcaggagaagtcggcaaatcaggtgtttgcctggatgaaacgcaagcagcccggcacgattacgccatggaactttgatcaaaaagttgatcgaatggcatcggctaaccgatttattcgccgaatgacgaccaaagatacttatttgattggtgaggacgtgttgccggacgccagtttaatttacgaacggtttaaggtcttgaatgagctaaacttggtaaaagctaattatcatcggctggcacctgctcaaaagcaggctgcttaccgcgatttgtttgagaatcaaaaatcaattagtacgaagaaacttcaaaattacttggttgaccaaggatattttacagccaaaccaaaaattaccggtttatctgatccagagcgatttaattcatcattgggaacctatattgatttcaaagaaattttcggtgatcaagtggataatccggaccgtcaagatgattatgagaagatcattgagtggtcaacggtatttgaagaccgccagatttatgaagccaagctgcgaacactggactggctcaccgaagatcaaattcaagcgttgaagacaaagcgatataacggctggggtcggctttccaagaaattgttaacggggattgttgacgaaaatggtgagcgaattattgacgttctctggaataccaaccagaacttcatgcaggttcaatcacaggaatcatttgctaaacggattcatgaagccaatgccaagcaaatgaaagtcaccggtgttgaggacattttggctgatgcctatacttcaccacaaaataaaaaagccatccgacaggttattcgggtggttgatgatattcaaaaggcaatgggtggtgtcgcgccaacgtcggtttcaattgagtttactcggtcggaagatcaaaatccgcgtcgaacgcaatcacgtgaaagtcaattgcaaaatacgtttaaggtggacgccaaagaaatcgttgatagtgatttggtaacagagttggagacggtttctaagagtaaaaaaggactaactgatcggctctatctgtacttcacccagcttggtaaagatatgtatacgggcgatccattgaatatcgatgaattgagcacttacgatatcgatcatattttgccacaagcctttattaaagatgattctttggacaaccgggttctcgtcagtaaagcggtcaataacggtaagtccaacaatgtaccagttaagctgtttggcggtaaaatgggtggcttctggaaagaattagcggatcatcgactgatcagcaaacgaaaattgaagcatctgctgacggatccagacacaattgataaatacaccatgcgtggcttcattcgtcggcaactggttgaaacaagtcaggttatcaaactggttgctcaaattttgggtgataagtaccaaaatgatgacaccaagatcattgaagtgaccgcaaaaatgaatcatcagatgcgggaaaactttaagctaatcaagaatcgtgaagtcaatgattatcatcatgctgtggatgcttatttgacagcctttgtgggccaatatttgtataaacgatatcctaagttgcggccatattttgtttatggcaatttcaaaaaattcaacgaagatcacgtgtcgttccgttactttaactttttgcatgagttaatggacgagaataataagcggattgtggagccggaaaccggcgaggttgtgttggaacgcgagccggcaattgcctatatgaagcgggtctatcactttaagtttatgctgatttcgcaggaggtgtatacgcgaagggatgctatgtttaatcagacgatttatccggcgaaggaagcgaatagaagaaaattaattgcgatcaagcatggcaaaccagttgatgtttatggtggatacagtggtagtgtggacgcttatatggcgatagttcgaattcatgataagaaaggagacaagtataaagttgttggggttccgatgagagcgttggaaattttaaatgcgactcatgataaaaaggactatgacgccaagttaaaacaaattcttgttccgaagtttaccaaggttaagaagagtcggaagaccggtgagattactaagaaggttgaagatttcgagattgttcttggcaaagtgatgtatcgacagctggtaattgacggtgataagaagtttatggtgggcagttcaacttatttgtataacgcaaggcaactcgtactttcagacagttctcttgacactttggcaagcaaagggactcttgattctgatgcagattctaaaaggctagttgctgtttatgatgaaatagtcgaaaaagttgataaatattttccactttatgataaaaatgcgttccgaagtggtctgcataaaggacgcgacaagtatttgctgttgccaaatcgaagtacctttaatggcgcaaaaaaggtccatagtggcaaaagagaaatactaaacgaaattttgaatggattacatgcaaatgcaacattgggaggtttgaaagatttgaaaatttcaactccgtttggaaaaatgcaaggtcaaagcggaattccattgtcatccaatactattatttgttatcaatcaccaactggtcttttcgaacatcgagtttcgttgaaagatttgtaa

SEQ ID NO: 312 - DNA, 4071 bp, Lactobacillus farciminis DSM 20184
atgactaaaaaagaacaaccttataatatcggtttagatattgggacaagctctgttggatgggctgttaccaatgacaattatgatctacttaatatcaaaaagaaaaatctctggggagtcagattatttgaagaagctcaaacagctaaggaaactcgactaaaccgttcaacaagacgacgctatagaagacgcaaaaatcgtatcaattggttgaatgaaatctttagtgaagaactagccaaaactgacccttcttttttaattcgactacaaaactcttgggtttctaaaaaagatcctgatagaaaaagagataaatacaatttattcattgacggtccgtacacggataaagaatactatcgagaatttccaacaattttccatttaagaaaagaattgattttaaataaagacaaagctgatattcgtttaatttatttagcacttcacaatattcttaagtatcgtggtaattttacttacgaacatcaaaaatttaacatatccaatttgaataataatttatcaaaagaactaattgaacttaaccaacaattaataaaatacgacatttctttcccagacgattgtgattggaatcacatcagcgatatcttaattggccgtggtaatgctactcaaaaatcaagtaatattttaaaagactttacattggataaagaaactaaaaagttgcttaaagaagtcattaatctaatcttaggaaacgtagcacatctaaatactatctttaaaacatcattaactaaggatgaagaaaaactcaatttttctggtaaagatatagaatcaaaattagatgatttagactccatactagatgatgatcagttcacagttctagatgcagccaacagaatatatagcactatcactttgaacgagattcttaacggcgaatcttattttagtatggctaaagtgaatcaatacgaaaatcacgctattgatttatgtaaactacgcgatatgtggcatactaccaagaatgaagaggctgttgaacaatcaagacaagcctatgatgactatataaacaaaccaaaatatggaactaaagaattatataccagtttaaaaaaatttttgaaagttgctctcccaactaatttggccaaagaagctgaagaaaagatatccaaaggaacatatctagtaaaaccacgtaatagtgaaaatggcgtcgttccttatcaattgaataaaattgaaatggaaaagatcattgataatcaaagccaatactatccatttctaaaagaaaataaggaaaaactactgtcaatactaagttttcgtataccttactatgtagggcctttacaatcagctgaaaaaaatccttttgcttggatggaacgtaagtctaatggtcatgcccgtccttggaactttgatgaaatagtagatagagaaaaatcttcaaataaatttattcgccgtatgaccgtaacagattcatatttagtaggtgaacctgtcttacctaaaaatagtttgatataccaacgatatgaagttcttaacgaattaaacaatattcgcataacagaaaatctaaaaacaaatcccatcggatctagattaactgtagaaaccaagcaacgtatttacaacgaactatttaaaaagtataaaaaagttaccgtaaaaaaattaacaaaatggttaattgctcaaggatattacaagaaccctattttaattggtttgtcacaaaaagatgaatttaattccactttaactacctatttagatatgaaaaaaatatttggctcgtcctttatggaagataacaagaattatgatcaaattgaagaactcattgaatggttaacaattttcgaagataaacaaatattaaatgaaaaattacattcttctaagtactcttacacacctgaccagatcaaaaaaatatctaacatgcgttataaaggatggggacgtttatctaagaaaatccttatggacatcacaactgaaactaacactccacaattattacaattatcaaattactctatattagatttaatgtgggcaacaaacaataatttcattagtatcatgtccaatgataaatatgactttaagaattatatagaaaatcacaatctaaataaaaacgaagatcaaaatatatctgatttagttaatgatattcacgtctcccctgctcttaagcgtggaatcacgcaatctattaagatagttcaagaaatagttaagtttatgggacatgcgcctaaacatatttttattgaagttactcgcgaaacaaaaaaatccgaaattactacttcacgagaaaaaaggattaaaagattacaaagcaaacttctcaataaagctaacgatttcaaaccacaattgcgcgaatatttagttccaaacaagaaaattcaagaagaacttaaaaaacataaaaacgatttgtctagtgaacggatcatgctttatttcctacaaaatggaaaatcactgtactcagaagaaagtctaaatataaacaaactatctgattaccaagttgaccatattttacctagaacttatatccctgatgattctttggaaaacaaagctttagtattggctaaagaaaatcaacgtaaagcagatgatttattattaaattccaatgtaatagatagaaacttagaacgttggacctatatgttaaataacaacatgatagggctaaagaaatttaaaaatttaactagacgtgtaattacagacaaagataaattaggttttattcatcgtcaattagtccaaacttctcaaatggtaaaaggtgtagccaatattttagataatatgtataaaaatcaaggaactacctgtattcaagctagggctaatctctcgaccgccttcagaaaagctctaagtggtcaagacgacacctatcattttaaacaccctgaattagtcaaaaaccgtaatgtcaacgactttcatcatgcccaagatgcttatttggctagtttcttaggtacatatcgcttacgtagattccctaccaatgaaatgttactaatgaatggcgaatataataaattctacggtcaagtaaaagaattatattctaaaaagaaaaagttacctgacagtagaaagaacggctttattatttctccattagtgaatggaacaactcaatatgatagaaatactggcgaaattatttggaatgtcggattccgagataagattttaaaaatattcaattaccaccaatgtaacgttaccagaaagactgaaattaaaactggtcaattttatgatcaaacaatctattctcctaaaaatcccaagtataagaaactcattgctcaaaagaaagatatggatccaaatatatatggtggctttagtggagacaacaaatcttccatcacaattgtcaaaattgataataataaaattaaacctgttgctattccaattcgattaattaacgatttgaaggataaaaaaacacttcaaaattggctggaggaaaacgtcaaacataagaaatctattcaaatcattaaaaataatgttcccataggacaaataatttatagcaaaaaagttggtctgttgtcattaaactcagatagggaagttgctaacaggcaacagttaattttgcctcccgaacactcagctttattacgactacttcaaatacctgatgaagatttggatcaaattctagcattctacgacaaaaatattctcgttgaaatactccaagaattaattacaaaaatgaaaaaattttatcctttctataaaggcgagcgagaattcctaatagccaacattgagaacttcaatcaggctactacctctgaaaaagtaaattcactagaagaattgatcactcttttacatgccaattctacttcagcacatttaatttttaacaatatagaaaaaaaggcttttggaagaaaaactcatggtttaacactcaataatacagattttatttatcaatctgtaactggcttatatgaaacaagaattcacatcgaataa

SEQ ID NO: 313 - DNA, 4062 bp, Lactobacillus fermentum DSM 20055
ctgatgcgtatcaaggggaagacggcaatcggggtgcggttgtttgaagaagggaagacggctgcagaacgccgaaccttccggacaacgcggcggcggttgaagcggcgaaaatggcgcttgcactacttagatgaaatttttgccccgcacttacaagaagtggatgaaaatttcttacgccgtctgaagcaatcaaatatccacccggaagatccagcgaagaatcaagccttcattggtaagctcttatttccggatctactgaagaagaatgaacgtggttacccaacactgattaagatgcgcgatgaattgccagttgagcaacgcgcccactacccagtaacgaacatctacaagttacgggaagccatgattaacgaagatcgccaatttgatctgcgggaagtttacctggccgttcaccacatcgtgaagtaccggggtcacttcttaaataacgctagcgttgataagttcaaagtggggagaatcgatttcgacaaatcctttaacgttttgaacgaagcctacgaggagcttcaaaacggcgaaggttcattcacgattgagcctagcaaggttgaaaaaattggacaactgttgctagatacgaagatgcgtaagttggaccgccaaaaagcggtcgccaaatttttagaggtgaaggtcgctgacaaagaggagaccaagcgcaacaagcaaattgcaacggccatcagtaagttagttctgggctacaaggctgattttgcaacggtagcgatggcgaatggcaacgaatggaagatcgatttaagttccgaaaccagtgaggacgagattgaaaaattccgggaagaattgagtgatgctcaaaatgatatcttaacggaaatcactagcctgttctcgcagatcatgctgaatgaaatcgtgccaaatgggatgtcgatttctgaatcgatgatggatcgttattggacgcacgaacgtcaattagcggaagttaaggaatacttggcgacccaaccagctagcgcacggaaagagtttgaccaagtgtataacaaatacattgggcaagcgccaaaggaaaagggctttgaccttgaaaaggggctcaagaagattttatccaagaaggaaaattggaaagaaatcgatgaattgctcaaggctggggatttcttaccaaaacaacggacatcagctaatgtggtcatcccgcaccagatgcaccaacaggaattagatcggatcattgaaaagcaagctaagtactacccgtggttagcaacggaaaacccagccactggtgaacgtgatcgtcaccaagcgaagtatgaacttgatcagctagtttccttccggattccttactatgttggaccgctagtaacgcctgaggttcaaaaggcgacatctggcgctaagtttgcttgggcaaagcggaaagaagatggggagattaccccttggaacctgtgggataagattgaccgtgctgaatcagctgaagcctttatcaagaggatgacggttaaggatacgtatctattaaacgaggatgtcctgcctgctaacagcttgctataccaaaagtacaacgtcttgaacgaactaaacaacgtgcgggtgaatggacgccgcctgtcagtcggaattaaacaagatatttactctgagctcttcaagaagaaaaagacggtgaaagcaagtgacgtggccagcctagtgatggcgaagacacgaggagttaacaagccaagtgttgaaggtttatctgatccgaagaagttcaattcaaatttggcaacctaccttgatctaaagtcaatcgtaggtgacaaagttgatgataactgttatcaaacggatctcgaaaatattatcgagtggcgttccgtctttgaagatggggaaatttttgcggataagttaactgaagtggaatggctgacggatgagcaacgttctgcccttgttaagaaacggtataagggctggggacgtttatccaagaagctactgacgggaatcgttgacgagaacggccaacggatcattgatctgatgtggaatactgatcaaaacttcatgcagattgtcaaccagcccgtctttaaagaacagatcgaccaactgaaccaaaatgccatcaccaatgatgggatgaccttgcgggagcgggtcgagagcgttctggatgacgcctatacttcaccgcagaacaagaaggccatctggcaagttgttcgggtggtggaagatattgttaaagctgtcggaaatgcaccaaagtcgatttcgattgaatttgcccgtaatgaaggcaacaagggagaaataacccggagccggcgtactcaattgcagaaattatttgaagatcaggcccatgaattagttaaggatacgagcttgactgaggaattggagaaggcactggatctttccgatcgttattacctctacttcacccaaggtggtaaggatatgtacaccggtgatccaatcaacttcgatgaaatttctaccaagtatgatattgaccacattttgccacaatccttcgtgaaggatgattccttagataatcgggtgttagtaagtcgggcggagaataataagaagtctgaccgggtgccagctaagctttacgcagccaagatgaaaccatactggaaccaacttttgaagcagggattgatcacgcaacggaagtttgaaaacctgacgatggacgttgatcaaaatattaagtatcggtcacttggattcgtgaagcgccaattagttgaaacacgccaagttatcaagttgacggctaacatcttgggtagtatgtaccaagaagccgggacggacatcattgagactcgggctggtttaactaagcaattacgcgaggaattcgatttaccaaaggtccgtgaagtaaacgactatcaccacgcagttgatgcttacctgacgacgtttgctgggcaatatttgaaccgccgttatccgaaattacgctccttcttcgtatacggtgagtacatgaagttcaagcgcgggtcagatctgaagctacgtaactttaacttcttccatgaattgatggaaggcgacaagagccaaggtaaggttgtcgatcaacaaactggtgagctgattacgacaagggatgaagtagccaagagctttgatcgattattgaacatgaagtatatgctggtatcgaaggaagttcacgaccggagtgaccaactgtatggagcaacgattgtaacagcaaaggaatctggtaagctcacttcaccaattgagatcaagaaaaatcgacctgttgatttgtatggtgcttatacgaatggaacgtcagctttcatgacgatcattaagtttactggaaacaaacctaagtataaggtgattggggttccaacaacatcggcggtcggtttaaaacgagttgggaaaccaggcagtgaatcatataaccaagaattacatcgaatcattaaatctaatccgaaggtaaagaaagactttgagattgtagttccacatgtttcgtatagtcagttgatagttgatggtgactgcaaatttaccctagctagtgatacttatcagcatccggcaactcagctagttctttctaaagaatcgatggaaataattgcagatgattttaaatttgtgaaagaaaatccggcaactgcggatgaacaacttgttagggtttttgatgaaattgttaatcaaatgaaccattactttactatctttgaccaacgtagtaatcgtcaaaaggtaacgaaggctcgagataagtttgtatcgttaccaacggaatcagagtatgagggtgctaagaaaacgcaagtagggaagacagaagtcattacgaacttactgatgggtctacatgccaatgctgcacaaggtgatttgaaagtattaggattatcaacctttgggtttttccagagttcaggtggactgaatttaagtgaagatgcaatgatcgtataccagtcaccaaccggtttgtttgaacgtcgcatttgtttgaaagacatttaa

SEQ ID NO: 314 - DNA, 4041 bp, Lactobacillus floricola DSM 23037A
atgaatcaaacaaaaaactatgacatcggattagatataggggttggatctgttggttggacaatcaccgattctcaatctcaaaaggttcttaaagtaaaaggtaagcaaggtattggtgtccatctcttcaacgaaggtcaaactgctgaagaacgtcgccagtttcggactaatcgtcgtcgtttaaaacgtaggaagtggcgtctaagattactcagagaattatttgatgaaccaatttcaagcattgatcctgaatttttcgcccgcttgaaatacttcaatgaatctagtaaagacccgaaaaataaaggctatcaacctcaattacacgatgatctaaaagatgttgacttctatcgtcaatatcctactatctatcatcttagacatgccctcatgacacaaaaagaaaaattcgatattcgtgatatttacttagcaatacatcatatcgttaagtataggggtcactttctcatgaatggtcacagtagtagcttttcagttgcccaaacagattggaaagcagatttaactaagctatttgaattaattcaagaaacacgcaccaacctcgacttctctttcgatttaacagaaatcgatactatcaagtctttattatttgataaaaatttaagtcgaaatgacagacaaaaagaaattgttggcttaatcaataataactcgcaattagataaaaaagataaagccctaaccaaacaactcgttgaatctgttgttaagggcattgttggtatgaaaaccagaactgatattttgcttggatatgaagttgataacaaagaacaaagtaaagcttggaacttttctattgatgagcttgatgatcaaatggctacaattgatcctgccttaagtcaaaatagtcaagctcacgatattattacgctgattcaaaagctctacatgactgttcaattagcacaaattgtgccagaaggacagtctgtatctgaaatgatgattaatcgttacaatctctatgctgaacagcttcaacaacttaaagactacaaaaaaatcaatcttgaaacgggtctattactacgtgaagcttatgatgagttaatgaccaaagcattaaccgctgcacctggcaaaactattcatgatactttctacaacaaagtcaaaaaaatactgaaagaccaagataataaacaagcgctgtcaatcaaacaagccattgaagacagtaattatctcattcctctcagaattaaaagtaatggcgtcattccttatcaacttcatcaacgagaattagacgctattattgaaaaccaaaaagaattctatccattcttagccacacctaatccagttgacggacatcaagaagctttgccctataaattggatgaattaattggctttaaagtaccgtactacgttggtcctatggttgatccggaagttgattctgaccaaaattttgcttggatggttagaaaagaaaaaggcgagattacaccttggaacttccataataaagttgatattacacaatcagcggataacttcattaaacgtatgaaaacaaccgatacttacttaattggtaaagatgttttacctcaaaatagcctattatatcaacgttataccgtacttaatgaactaaacgggattaaagtagccaacaaaaaattaactattgaacaaaaacaacgtctttatgatcagttgttcaaaaagaaaaaaacagtcaaaaagcaagacatcctcaacaatctagttgctgcaggtgaaattcatgaagatgataatctgactggattatcaaacggtacaacctttaataacaatttaggcagttacatagattactgcaaaattattggccaggataaattagaagatgcttccaaacaagccgatattgaaagaataattgaatggtccacaacatttgaagatgctaacatcttcttaacaaaattagcagaaatcaactggctaacagaagatcaacgccaaaagctgagtcaaattcgctaccgtggatgggggcaattctcaaaaacattgttaaccgatatcaaagacaataaggataactcgattattgataacttgatgtctaccaaaaaggtattcatgcagattatcaacgacaccacaatcaaacaaaaaattgacgattacaatcaatatcatcttaatcatgcagacttaaaagacaccattgctaacctcttcacctcgccacaaaacaaacgtgccattaatcaaacgttgctagtcattgaagatattattaatgctgttggtcacaagcctaatcgtatttttattgaaagtgctaaagataaccgtaatgctaaaaatcagttaactcaaagtcgattaaaacgtattgtgaaacaattcgaagacaataaacaacatgttgatcaatccgtttatgaagaacttaaacaactagatgatggttctcatgcttcaattgatgaccgcctactcttatacttcctacaaaatgggaaagatatgtatactggtcaacctattgatatttcacaactaagtactagccaatatcatatcgatcacatcctgccacaagccaaagtaatggataatgctttagataatcgtgtgctggttagttcaaaagccaatacagaaaaatcagaccgattcttgagtgaaatcccccaatttcaacaacgttcattatgggcagaacttgaacgtatgggattcttgactaaagctaaaaaagaaagactgctaatgacatcagatgaattcaaacaaaactcagttaggttcatcgctcgtcaattagttgagactcgccaaatcatcaaattagttaaccagttaattattcaagagcatcctgaagtgaaactagttaatattaaggccgacttgactaatgccttcaggaaaaagttcaatttcgtcaaaaatagaaatgccaatgattatcatcatgcattcgatgcctaccttaccagcttgattggtagtcatctgctcaagtctcaccctaaatgggaaccactttttgtttactcagactatgacaaaattaaattcgataatgccccacaaggtgtgaatatcatgaaagaattcgagcagtctaaattagctgatgaaaatggcgaaatcatctggaataaagatgaaatgatggcttacctagaacgcttatataattcaagacaaattcttatcaccaaaaaagtttatgcacgtcatggtaacttgttcaaacaaaccatcttcaaagctggtgaaagtgataacttaatccctgtcaaaaataatcgttctgatattgctatctatggcggatacaaaagtaaacaagtcagttactatgccctaattagtctgcataacaaaaaacgtcaaaagagattagtagcggtctatcttattgatatccaaaaactccaaaatctcaatgaaagtgactactttaagaccttacacaccattatcaaagaacgtcataacatcaaacctgagttcgatattctagctgataaaatctatcaaaatcagctaattattgacaataaaaatggttcaaaccgaccattcagaattgagggtgacttcaaaaatgaccgtcaactctacttgcctttacaataccaacgttggctggcatctaaagaacctacagatgaaaaactcaaccgtatatttgatcacatttgtgaacaattagctgactacttcccactatttgcgggcaatgcctgtgacaaattgctggataatcgtgataagttctatcaattatcaatcaaaagtgaattcaacgataaaggcaaactaatagctgaaggtaaactatccgtaattgataaactcttagtagcaatgcatgctgatagtcgtaattctaatttagctgtaataggactatcgtcatcttggggtagatttaaattgcacggcggaaacgaagcaatcggcacatcagttcaactaattcatcaatcaccaacaggattattcaaacgcatccaaaggtttaactaa

SEQ ID NO: 315 - DNA, 4209 bp, Lactobacillus floricola DSM 23037B
atgacatatagaaactatcatattggactagatattggaacatcgtcagttggatttgctgtaagatatgacaatggtgaattagttcataaaaaaggaagcaacttagttggggctagattattcaaagaaggggaaacagccgaagaaagacgtcttaataggggagcacgtagaagatataacagaagaaaatggcgtttaaatttattaaatcaaattttcaaaccattaattgaagtaaatgatccaacattctttaaaaggctagaacagtcaaacctagttaattatgataaatcagaatcttttagcttattaaataatcaatcagatgataagttgcatcagcaattcccaacaatttatcatttaagagattatttgatgaaaagcacagaaaaagcagatattaggcttatttatttagcagttcatcatattgttaagtatcgaggcaattttttagatgcttcgcctgtagattcatttgaagcatctaacttaaaggtagacgaaattcttacacaaattaatttattattggataatttaacagacgatttacgacttaatactcaatatgtaacagacatcgaacaaactttactttccaatactgaaagtaataaagataaagaaaaagttattcaaaaactactactacataaagaagcaattaagattgataaagataggactgctcagattgcgaaattggttttaggttataaagctgacatagccaaattatttggaattactgaaaaacttcaaacacctaaattagaattatcagctgccaatagtgacgatgctttgatggaactaagtgcagaattaaatgaagaccaaataggtattttactccaattaaaaacactttattcaagagtcagacttaaccaaattattccttcaggaactagtttatctaagtctatgattgaaaaatatgagttgcatcatacacaattaaaatcattcaaagaaaacattttattaaagttacgaagaaatactgcagttagacgaaatttagaattagcttatgctttatatgttgggaacgctcagacaaaacaagaagtttttgaacctaaaaaagctcgatttacaagtgatgactttgcgagtttaaaagctaatgcaaaatcagcatctagtgttaaagaggcacccaaaaatacaaaaacgaaattaacaactgatgacttctacaatatactaactgaactgtttgcgacatttgaatcagaattgtcagcagacgaagatatgataaaagaagttgaacaaattaaaaaagcaattactggggataattatttacctaagcaaagaacagatcaaaatggtaatattccgcatcaactgcatcaaattgaattaaggcaaattcttcaaaatcaactgccacattatccagaaatggataaaatcaatgagcaaaagccaatagaaaaactagtaacatttcgtgttccttattatattggcccattaattacgcctgaagaccaacaaaagtcatcagctgctaattttgcttggatgaagcgaaaagaacaaggtgcaattacaccttggaattttgatgataaagttgatcgcatgcaatctgctacaaactttattaaaagaatgactgttaaagatacttatttaattaatgaagatgttttaccagatagaagtctcttataccaaagatttaaagttttaaatgaattaaatttagtcaaagttaataaccaattgttgtcaattggtgagaaacaagctatttatcatgatttattcgaaaaacaaaaaacagtaagcactaaaaaattgcaaagttatcttcaaagcgaacaaggatatggggataatatcgagatatcaggcttatcaaatccagacaaatttaataatggcttaactacatatattgatttcaaaaatatttttggtgatttagtcgaagatacaacgaagcaaaaagaatttgagcaaataatagaatggtcaacagtatttgaagatagagctatttttaaagcaaaattgcaagaagtgaactggttgacagaagaacagattaaggcactggtagctaagagatatagtggctggggcagattatcttatcgactactcgcagagttagtaaatgacaatggtgaaagaattattgatattttgtggaataacaaagggagcaatttgatgagtattgtctcgcaagatgagtttcaacagcaaattgcacgaatcaatagccacgaagttcaagaacttgggatggaaagtgttttggctaatgcttatacttcaccgcaaaataaaaaagccattcgacaagtaatgaaagttgtcgatgacattcaattagcaatgaatggacaggcaccaacctcgatttcaattgaatttactcgaaaacctgaagaaaatagtgaaattagcaagtctagatatgaaacaattacctcaatttatcaatcactttctaaagatattgaaaaagaggtgaaggataatctaaataagaacaagagcagtcttaaaaagaatctgtcagataaatactatctgtactttacacaattaggacgcgatatttacacaaatcaacccattccatttaatgaaattccttattatgacattgatcatattgtgccacgttcagttgaaatgaatgattctttaaacaatcgagtactagtagcgaaaagcattaaccaaatcaaaaaaaataatgcacctatcgatagttcattgaagataacaagtgaaacacgtcagttgtggaaaaaattattagatagtggcttaattaccaaacaaaaatattataaattaagcagtagtattaagaatacggttagtccttacgttaaacagggcttcattaatcgtcagttggtagaaactagccaagttatcaaattggttgctaatattttgggaactaagtatcaaaatgatgatactgaaattattgaagttaaagcccatttaaactctgaaattcgtaagacttttgagttctataaacttcgagaacttaatgactatcatcacggattcgatgcttatttgacaacacttgttggtggttacttatataatcgttatcctaagttaagaagctattttgtttatggtgatcataagcgtttagataaagcacaactttctgaacttaaaaactttaacttcttacatggcttgactaatccaaagtctggttcagacgggttaattactgcatctggctcacaacaagttgtgttagacagaaatgaaacgatcaaaagattaaacaaaatttatcgatacaaatatatgttaatctctcgtgaagtatttactaaacaaggacaattctataacgagacgatttatccagcaaaacctaatacagctaaaatgatacctttgaaagacaacaagccaagtgaagtctatggtggatattcaagtagtaacgtttctaagattgctttgataaaggaaaagaatactgataattatcagtttattggtattccaattcgctctattgctaaattaaagcaagcaaaagccaatagtaaaacagtttatcaaactgaactcaatcgagtgattaaatctgtattagctagtcaaaaaactaaaaagcaaaaagaatttgaagttatattggataacgttaaatataaccaagtggtggttgatcaaggagagaaatactatctaggaagtccttactataaaaagaatgcaaaacagttagtgattagtcctgaatcggttaaaatattggctgataaagcaactgcagacttacctgaacaagaggctcacaacaaattaatgacagtttatcaagagattgtagacgtattaaataagcattttgctttatatgatataaataatgttcgaaaaaaattaaatgacggattaattaaatttagccaattgccaaattatgatgaaacatcaaaaaatagatttgatatttctaagtcaattaagactaagtatgctgttattatgagaattttgagtggtattaaaaatcaaacaagcgaggttccagaacttggcttaaaatctccgttaaataagatgcaaacaaaaggtggtataaaaatttcacccgaagctaaaatatattactcatcaccgactggaatttttagtcactttaaacaagttaaaaatctataa

SEQ ID NO: 316 - DNA, 4095 bp, Lactobacillus fuchuensis DSM 14340
atgaataagcgatataatattggattagatattgggaccaattctatcggctggtcagtggttaatgatcaaagtcagttagtcagaattaagggaaaattagggtacggtgttcgactgtacgatgaaggtcaaacagctgaagaccgacgactgtttagaacgacgcgccgccgcttaaaacggcgtaaatggcgcttaggtttattacgcgaaatttttgaaccttacatcacaccgcaagatgcgacttttttcttaagacagaaacaatcgaatttaagccccaaggatttacaaaaacagcagccacaaattggtttatttaatgatcgtttggacagcgattttcactatcaatatccgacaatttatcatttgcgctacgcgttaatgactgaaaagcggcaatttgatttacgcgaaatttatttggcgatgcatcacattgtcaaataccgggggcattttttgaacgcagctgccgcgtcatcttttaaaagcggagaaattgatttagctaaggatttcgcagcgttaaatcagatttttggaacaatctttagtgaagtcggcttcagtttatcagaaagcaatttagatgagattaaatcaattttgttggataacaatttaagcgctagtgtgcgccaacgcaaagcactaccgttaatttaccaaaccgctgcttcaaaagattcggaaaagcaatataaagcaattgcaactgaattattgaaagcgattctaggcttaaaggcgaaatttaatctcatcacaggtatcgaagtcgaagatgtcaaagcgtggacgttaagttttaatgctgaagattttgatgctaagttgagcgacttaaatattgcggataatgatgacgccgtacaaatcattgaaattttacgagctctttattcaggtgttttactgactgggattgtgcctgagggacaatcaatttcacaggcgatgattgataagtatgaagcgcataaagcacatctgataatgttgcggtcaattcgcgaacaattatctgataaagaaaataaagcacttgaaaaggcatatgatgactatattgatcatccggaagataagcagcacggttcacgtgaggatttctatgcggcaatcacgaaagtattaaaaaaagattcagaggatacaaatattatcgaaattctaaaattgattgaattggatcagtttatgcctaaacaacgcactaaggacaacggcgccattccacaccagttacatcaacaggaattggatcaaattattgaaaatcaaaaacaatattatccttggttggcggacattaaccccaatgaacaacggcaaaaaatggcgccctataaattagatgagttggtgacattcagagtgccttattacgtcggcccgatgattacggctgaagaacagttccaaacttctaataaaaaatttgcatggatgattcgtaaagaaccaggcgcgattacgccgtggaattttgatcagaaagtcgaccgccaagcttccgcgaatgaattcattaaacgaatgacaaccactgatacttatttgttggccgaagatgttttgccaaagcaaagtttgttgtatcaacggtttgaagtattaaatgaattgaatggcattaaaattgatgatcaaccgattacggtcgaacaaaagcaagccatttttaacgataaattcatgcaacaagcgcatgttacggttaaaaatattcaagcttatctcgtctctgaggggcagtatgcgagtcgaccaaacattacgggtttgtcagatggtgagaaatttaatagtagtttgagtacttaccatgatcttaagaaaatctttggggatatgattgatgaccctaataagcaaaccgattttgaaaaaatgattgaatggtcaacgatttttgaggatggcaaaatatttgctgataaattacgtgaaattaattggttaacagacgaacaacgccagcgactatcgaataaacggtaccgtggttggggccaattatcgactaaactattaaccaaaattgtcgatcaaaatggtcaacggattatcgatattctttggaataccaatgacaattttatgcggattattcattctgatgattttgatcaggccgtgactcaagctaaccaaatgttattagcggataatgatacgcaagatgtaattaacgagttatacacgtcaccttccaataaaaaagctctacgacaaatattactagtcgtggccgatattcaaaaggcgatgaaggggcaagcaccggctcggattttaatcgaatttgcgcgtgaaaaacaagctaatccgcgattatcaacacaacggcgtcgccaagttgaacaagtctatcaagagctaaataatgatcagctcaacaaagaattggccgatccacagtatgctaatttatcgaaagatcgactattcttgtatttcatgcaaggcggtcgggatatgtatacgggtgagtcgttaaatattgatcggttatcggagtatgatattgatcatattttaccgcaagcctttatcaaagataattcgttggataaccgggtattagtatcggcaaaaatgaatcggagtaaatcagaccacgtaccgcttgattttactgaagaacgatttgggcaaaaaatgcgcagtcagtgggaacaaatgttacgggccggtttgctgacgcgccgtaaatataataatttaacgttaaatccagatagtctcaataaatataccatgagtggctttatcaatcgccaattagttgaaacccggcaagtgattaaactcgcaactaacttattagtcgatcaatatgccgatgaagacgtgcagttagtgacggttaaaagtggcttaacccaccaaatgcgcgaagattttgattttcctaagaatcgaaatttaaataattaccatcacgcttttgatgcgtatctaacggcttttgtgggcctctatttactgaagaaataccctaaattggcccattatttcgtctacggtcaataccaacaaggttttaaggccaatgaccagtggcgtaactttaattttctaaatggtttacgtcaagagcaacaggtcgatgctgaaacgggtgagcttatttggcaaaaagaccatgatttagcttatatgaataaaatctatgatttcaagaaaattctggtgacgcgtgaagtgcatactaatcacggcgcgttgtataatcagacgctctataaagctaaagatgacaaagcgagtggtcaaggtggtcgtcaattgattgcagctaaagaaaaccgaccaacggcaatttatggtggttattctggtaaaacagtcgcttatatgtgtttagtgcgaattactgaaaaaaagggtgatttttatcgtatttgtggggtgcaaacagcttgggttgatgagctagaacacattgaagacgcaacgattaagctgcaaagattgactgcattattaacgcctcaattttccgcgactaaaaagcaaaaagatgaagttgtgacagtcgttaaaccattcgaagtgctcttaccgaaaattttaattaatcaacggttctacgacggtggccaagaactaacattggcatcggcaacttataaaaataatgcgcaagagttagtacttgataaaaaagccgtgcaagtgttaaatggccaattgccaaaggctgagttggaggcacaggcaacagttgtttatgatcaaatattagaacgagttcagaaatatttcccactgtatgacatgaatagttttagagagaaattatttgtaggacgtgataaatttaacgaattaccatggcaggatcaatgggagaatcataaattaattcaggtgggacaaaagacaattttagatcgaattttgattggattacatgcgaatgcagcgatgggggatttaaaagcactaaatatgtctacgccgtttggaaaacttcaaaaatctaatgggatatcgcttagccctgagacccaaatcatctaccaatcaccgaccggtctgttcgaacgacgtgtggctttgaaagatttatag

SEQ ID NO: 317 - DNA, 3390 bp, Lactobacillus futsaii JCM 17355
atggcagatagaatcagtttaggtttagatattggtgtggcctcggttggattcagtgttttggacatcgacaagggtaaagtcatcgaattaggttctagattattcaatgcaactgttgctgaaggtaatcaagaccgccgtagtatgcgtggtgctagacgattattgaatcgtaataaacaacgtcgccaagatactggtaagttatttcaaaaatttggcttgttagacaattttaacaaggataatttttatgatactttcaatcaaaattggaatccttatgaattaagagttaagggattaactgaacacttaactaagaaagaattggctgagagtttgtatcagattgtcaaacatcgtggtattagctatgccttaaaggatgccgatgctgatgaaggtggaactgactattcagctagtttaaaaatcaatagtcaagaattggctgagaaaactcccgctcaaattcagttacaacgtctaaatgattatggcaaagttagaggacaagtagttattggagatgatcctgataatcaaaaagtattattaaatgtctttccaacgagtgcctatgaaaaagaagctaagcaaatcattgctactcaaaaacaattttatccagagattttgactgatgagtttactaaagaatattgcaaaattttgactagaaaaagagattattttgttggaccaggtaatgagaaatcacgaactgattatggaatttataaaaccgatggtcgaactttggataatttattcgaagagctaatcggtcacgataaaatatatcctgacgagttaagagcttcggctgcatcatacactgcacaattgtttaatgttttgaatgacttgaataatctaagaattttgagttatgaagacggtaagttaactaaagaagacaaagaaaaaatcattgccgaaataaagagtaatacgacaacgataaatatgttaaatgttattaaaaaagttgctggttgttcaaaagaggacattaagggatttcgtgtcaacgaaaaggacaaaccagaaatcagctcaatggcggtttaccgtaaagttcataaggacttactcaaggtaggggttgatataagtgattggccggttgagtttatcgataagttaagctttattttgaccttaaatactgagaatggtgaaattagaaaacaacttaataatcgattagtcccagaatttgattttttgaatgatgatttgattcaattgattattgataataaagatagttttgaaattaaaactaataataaatggcatcgtttctcattgaagacaatgaataaattgatgcctgagatgcttgaacgtcctgttgaacaaatgactttgttgaatgaaatgggtttggttaaaaaggataagaaacgttttgaaaataacaagtacttgccttacaaagaaattgcgaaggatatctttaatccagttgcgtctaaatcagttcgtgaagctttgaaaattgttaatgcagttctgaagaaatacggacacattgactatttagttattgaaatgccacgtgataagaacttaaaagaagaacaagataacattaaagaatttcaaaataaaaataaaaaggccaaagatgctgctttcgaggcctttgttaaatcagtcggtagtgaacaaagagtaaaagaagctttgagtaagaaccgtaaattacaaatgaaaatgcgtctgtggtatcaacaacaagaaattgatccatataatggtgaaacaatcgatgctactgatttaatcaataatcctgataaatttgaaattgatcatattattccacaatcgatttcttttgacgatagtatcaataacaagaccttgtgttttgcttcgatgaatcaagttaaaggacaaaaaacaccttatgaattcatgcttgaaggtcatgggcaaggttatgacaaatttaaggctactgttttagataataaaaacttcgacagaaataaacgtaagaattatctctttgaagaaaatgtcagtgatattgagacaagaaagagattcttatcacgtaatttagttgatacgagatattcttctcgagtagtacttaatagcttgcaagatttcttccatgaaaaatcagctgatactaaggtaacagttattcgtggtaaatttacctccaacatgcgtaaacattggcacattgataaaactcgtgaaactttccatcaccatgcgattgatgcctcaattattgcagctactccgtttttgagaatgtggaaaaaaggtggcacaattttcccagttaaggttggtgaagaatcaatcgatattgaaactggcgagattttggacgataaaaaattcgataaagtgatgtatgaggaaccttataatggttttgtttctgaaatcatgaatgcagatgatcgaattaaattctcacaccaagttgataaaaagatgaatcgtaaagtaagtgatgcgacaatttattcaactcgaactggtaaattagctaaagataaaaaagatgctgagtatatcgtagctaaagtgaaagatatttatagtgtcgatggctttaagaagtttaagaaagtttatgataaagataagtctaagttcttattgtataagtatgatcctagaactttctccgagttagaaagaatcataagcgactgtccagataaagttgaaaaagtacaaacaaatggaaaggtcaaggccgtggatgtaagtccatttgaaatgtatcgaagataccatggaatgattaagaaatattctaagaagggtaatggaccagccattaaacaacttaagtatcttgataagaagctcggttcacatattgatatcacaccagctaatgccaatggtaaacacgttatccttcaatcgttgaaaccttggagaaccgatgtttatttgaatcatgaaactggtgaatatgagattatgggaattaagtattctgatctgaagttcaataagaatgtgggatatggaattaagaaagataagtatttggaaattaagaaaaatgaggaagtatcggaaaaatctgagtttatgtttagtttatatcgtaaagatagagtcaggattcaaaatatgaaaactggtgaatcagtggaattattattctggtcaaggaatttttctaataaaaagtatgcagaattaaagccaatttttaaatttgtgacggaagatgatgattggccagtatatgggcatgcaaaaacacaaatattgaaacgattagtgccaaaagattgtaagatttggaaagtaaatacgactattctaggagatccatactacttagaaaaagaatccgataatccaaaagatatccttgattaa

SEQ ID NO: 318 - DNA, 4161 bp, Lactobacillus gasseri K7
atgaccaaaataaaaaatgaatatattgtgggcctggatatcgggactaattcgtgtggctgggtagcaatggattttcaaaatactattctacgaatgcatgggaaaactgctattggttctcatctatttgatgcaggaaattcagcagctgatcgtcgtgcttttagaacaacacggagaagaataaaaagaagaaaatggcgcttaaaactactagaagagatatttgatccgtatatgacggaagtagatccttatttttttgctcgtttaaaagaatctggtctttcacctttagataaaaggaaaaatgcatcttctatagtttttcctactgccttagaagataagaagttttattgcaattatccaactatatatcatttgcgttatgacttgatgagtgaagataagaaatttgacttaagagaaatttatcttgcaattcatcacattgtgaaatatcgcggtaattttttatacaatacacctgttaaagacttcgaagcttcaaaaatagatgtaaaagatagtttggagaaattaaatgagttatatgaaagattagactcagaatttactgtagagcttgatagtagtaatgcattagaaattgaaaaaattattcgagataagaatgtttttaagataaataaagttaagtcaattcatcaattactttctttaaaaactgagaataaggagcgtactaagttaataaaagatgtttctaagcaaataataaatgctattttaggttacaaaactaaatttgaaactattttgttaaaaaacattagtaaagatgaagcagacgactgggaatttaagcttactgatgtggatgcagataataagtttgaaaatctaattggggaccttaatgaaaatgaacaagaaattctgttagtaatcaggaatttggctaacgcaattactttaagtaacattgttgaagagggaaagactttatctgaatcaatgatcgataagtataataagcattcagatgatttgaaactattgaaacaagttatttcagatcatcctgatcgagataaggctaagaaattagccttggcttatgacttgtatgtcaacaatcgtcatggaaaacttcttcaggctaaagatgtcttgggaagtaagaaaactttatcaaaagaagatttttataaagaagttaaaaagaatctagatgattcaaaggcatcacaagaaattttagatgcaattgccttagattcatttatgccaaaacagaggacaaatgaaaatggtgtaattccatatcaacttcatcagcttgaattagatagaattattaaaaatcaaggaaagtactatccgtttttaaaagaggcaaatcctgtttcttcacatttaaagcaagcaccatataagcttgatgaactgattagatttagagttccttattatgtaggaccattaatttcaccaaacgaatctacaaaaaataaacaaacaaagaaaaatcaaaattttgcctggatgatacgtaaggagcaaggtcaaattactccttggaattttgatcaaaaagtagatcgaatggcgtcagcaaacaagttcattaaacgaatgacaactaaagatacttacttattaggtgaagatgttttaccagctaatagtttactttatcaaaagtttacagtattaaatgaacttaataacataaaaattaatggtaaaagaatatctgtgcctttaaaacaagaactatataataacttgtttaagaagaattcaacggtaactaccaataagcttaaatcctatttgaaagagaattataatcttattaatgttgaaattaagggattagcagatgaaaagaaatttaattctggattgacaacttataataaattaagaaatttgaagatttttgatcaacaaattgatgatcttaactatgataaagattttgaacggattatcgaatggtcaactatttttgaagataaggctatttataaagataaattgaaaactataaaatggctcagtgatagacaaattgataaactaagcaagattagaatgcaaggttggggtcaattatcgaaaaaattattatcacaattaactgataataatggtcaaactattattgaacaactttgggatagtcaaaataactttatgcaaattgtaaatcaggctgattttaaagatgctattgcagttgccaaccaaaatttattagttaataccagtgtagaagacattttaaatgaggcttatacgtcaccagctaataagaaagcaatccgccaagtcgttaaagtggttgatgacattgttaaagcggcctcaggaaaagttcctaaacaaatcgcaattgaatttactagagatgcagacgataaagctaaaataagtcaaactcgagcaaataaattgcgcaaagtttataaagaattatctaatgaattagcatcggaggctattagaaatgagttggaacgggttgctaaagatcaaaaattgttgaaagataaatattatttatactttatgcaacttggtagggatgcttatacgggtgaaccaattgatattgatgaactagaacaatatgatatagatcacattcttccacaaagctttattaaagatgattctctggaaaaccgagttttagttaaaaaagcagtaaataatggtaaatctgataatgtaccagttaaattatatggaaatcacatggcggctgacttaggaataacgattcgtcatatgtgggaaaaatggaaagatcaaggattaattactaagactaagtataataatttaattattgatccagataagataaataaatatgaatcttcaggcttcatacatagacaactggttgaaacgagtcaaattattaaattagcttcaacgattttgcaatctaagtatcctgatactgaaataatagttgttaaagcgcgatataatcattatttgcgaaagcatttgaatttatataagagtagagaagtcaacgattatcatcatgctattgatgcgtatctttcagctatttgtggtaatcttctttatcaggtttatccttatttacgtcctttctttgtatatggacaatataaaaaatttagttctgatcctaaaaaagaaaagataatttatgataaaacaagaaaatataattttatttcgcaaatttttgaaaacaagggtaacgatattatcagtcttgaaactaagaaaaaggtttttgataaaaaagatataattgaaaaattgaaacatgcatatgattataaatacatgcttgtttctcgagaaactgaaactcgcgatcaggaaatgtttaagatgactgtttatccgcgtttatcgcgtgatacaaaaaaatcacgtaatctaattcctaaaaagaaagatatgcctactgaaatatatggcggatatacaaataattccgatgcttatatggttattgctaggattaataagaaaaaggaaaccgaatatcgcgtgttcggagtaccaatgcgtgaattagttaatttaagaaaagctgagaaaaaaggtcactataatgcttatttgaagcaggtgcttgaacctgaaattatgtataacaaaaatggaaagaaaaataaaacaattagttcatttgaaattgttaaatcaaaagttccatataagcaagtaattttagatggtgacaagaagtttatgcttggaagttcaacatatgtatataatgctaagcaattaactttatctcaagatgctatgcaagcaattacagataattgtgaaaatgatacggatgaagagaaagctttgattgaagcatatgatgaaattcttacaaatattgataaatatttaccattatttgatattaataaatttagagataaattacatgctggaagagaaaaatttattaatttatcgttagatgtgaaaaaagatacaattttgcaggtgttgaatggattacatgataatgctgtaatgcctaaaattaagtctttaggattatctacggaattgggaaaattacagattcctacaggtgtaaaattatctgagaatgcaaaattaatttatcaatctccaacaggtctatttgaaaaacgcgttaagatttcagatttgtaa

SEQ ID NO: 319 - DNA, 4111 bp, Lactobacillus graminis DSM 20719
atgtatgaaacgttcgtataatattggtctagatattgggaccaattcaattggctgggcgattgttgatgatcaaagtaaactaatcagtgttaaaggaaaatatggttatggggttcgcttatatgatgaaggccaaaccgctgctgagcgccgtagtttcagaacaacacggcggcgcttaaagcggcgtaagtggcgcttgggattattaagagaaatctttgaaccctatatcacgccgattgatagcacttttttcttacggcaaaagcaatcaaatttaagtcccaaagatcagcgtaaattatatccgcaaacgagtttatttaatgatcgtccggatgccgatttttatcagcaatatccgacaatttaccacttgcgatatcagttgatgactgaaaagcgccagtttgatattcgtgagatttatttagcgatgcaccatattgtgaagtatcgggggcacttcttgaacgaagcgccggttgcctcatttaaaagtagcgaaattaatttagcagagcattttgatcagttaaataccatttttgctgacttatttagggagtccggctttcaattagagactgatgaattggtagcggttaaggcccttctaatggataatcaacaaagtgctagcaatcgccaacgcaaagcgttaccaaagctatacacgccaagtgcggataagtcgattgagaagcaacgtaaagccattgcaactgaaatattaaaagccatcttaggattaaaggcgaagtttaatgtggttactgggattgaagctgaagatgttaaagcatgggcattgacttttaacgctgaaaattttgatgaagaattggctaagctcgaaagtagtctcgatgacaatggccacgaagttattggtatcttacaggaactttattcgggaatcttactggccggaattgtccccgaaaaccagtcattgtcacaagcgatgatcacaaaatatgaagaacatcaagcacatttaaaaatgctaaaagcagtgcgagatgatctagcaacagcagatcaacaaaaactaaagaaggcttatgatcagtatatcgatggtcaagaaaatacgaaggcctattcgaaggaagctttttatgacgacgtcacaaaagccttaaaggattattcagaacaaccgctcgtgagtgaaattcaaaaattaattgagcttgatcaatttatgcctaaacaacggaccaaagataatggggcgattccacaccagttacatcaacaggaattagaccggattatcgagaaccaacagcaatattatccatggttggcagaactcaatcccaatccgaagcgccaaaccgttgctaagtacaaattagatgaattagtggcatttagggtaccgtattacgttgggccgctcattacagctgagcaacaacaacaaagttcaaatgccaaatttgcatggatgattcgtaagactgaaggccgcattacaccatggaacttcgatgataaagtggaccggcaagcatcggcgaatgagtttattaagcgcatgacaaccactgacacttatttattggccgaagatgtattaccaaagcaaagcttaatttatcaacggtttgaagtattaaacgaattaaatgggcttaaaattgatgaccaaccgattactaatgagcttaaacaagcaatcttcaatgatttatttatgcaaaagacaagtgtatcagtgaaaaacattcaggattacttggtatcagagaagcgctatgcaagtcgccccgcaattactggtctatctgatgagaaaaaattcaatagtcgattaagtacgtatcatgacttaaaggtgattgttggggatgcggttgatgatgttgataaacaagctgatttggaaaaatgcattgaatggtcaacgatttttgaagacggtaaaatttatagtgctaaattgaatgagattacatggttaacagaacaacaacgggggcaactagctactaaacgctaccgcggttggggtcgcttgtcggctaaattattaacgcaaattgttaatgcaaatggacaacgcatcatggatttactctgggatacaaccgacaacttcatgcggattgttcactttgaggactttgacaagttaattactgaagccaatcaaatggtgttagctgaaaatgatgtgcaagatgtcatcaatgatttatatacgtcaccacagaataaaaaagcgctccgccaaattctacttgtggtcaatgacattcaaaaagccatgaaagggcaagcaccagaaagaatattgattgaatttgcgcggggggcacagaaagataaaagtttgacagttcggcgtaaaagaaagctagatgagatgtatagccaaataagcgatgctgtacttgcagatgaaagtgttcggcaagaactgaaaagtagtaatcaagatgacttagttaaagagaaagtgtacttatacttcatgcaaggaggacgagatttatataccgggaatgcattaaatattgatcgtttgtcggactatcatgtcgatcatattattccccaggcttacattaaggatgattccttggataataaggcgctagtatcatctagaatgaatgagattaaagccgatcgagttcctcttcaggtagttcagaagcaatttggcaaaaatatggcttctgaatggggctacatgcatcgagcaggattaattagtcggaaaaaatatgataatttaatgttcaatcctgaaaacctaaataagtatcagattaatcgttttattagccgtcaactggtagaaacccaacaagttatcaaattggtagcaaacttattgagtaaccagtatgaaggtgataatgtcaaaatcattacagtcaagagcaagttaacacagacgatacgttctgaatttgattttcctaaaaaccgagaggtcaataattatcatcatgcttttgatgcttatttaacagcttttgtggggatgtatttattgaaacgctatccaaaactaagttcatactttacttatggcgaatatttaaaaggaaatcaacaggataagtggagtagctttaatttcttaaatgatttaaagagggctaaattagaagataaaactaataaggaaatcttttggcataaagaatccggcctagcttacttgaataaaatttatcagtttaagaagattttagtgacccgcgaagtgcatgaaaattcaggagcattatttaatcaaacactctatgcggctaaagatgataaagccagtggtcagggcgggaagcaattgattcctgctaaacaagcccgaccaactgcgctctatggtggatactcagggaagactgttgcctacatgtgtatcgtacgcattaaaaataaaaagggtgatctctataaagtctgtggtgttgagacaagttggctagcacaacttaaacaactgaaagatgaagactcacaaaaagcattcttaaagcaaaaaattagtccgcaatttacaaaagcgaagaaacaaaaaggaacgattgtgaaagtagtcgaagactttgaagttatcgcaccacacatcttaattaatcaacggctctttgataatggtcaggaattgacattgggttctgcgacgtataaacacaatgagcaggaactgattctcgacaaaacagccgtcaaattgttaaatggtgaattgccattagcgcagtctgaagaacttgctgaactagtttatgatgagattttagatcaagtgatgcactacttcccattgtatgatacaaatcaatttagagctaaattattagcgggtaaaacggccttcatgcagttaccatggaagagtaatcctgatgataataagacagtacagattactcagccgatagtgttgaaaaaaattctacaaggactgcatgctgatgcgggacgtgtatcgttaaaagaattgggaatgaccactgattttggaatgttgcagaaggctactggtattacattcacacctgacacccaaattatctatcaatctccaaccggtttattcgaacgacgagtagctttaagggatttataa

SEQ ID NO: 320 - DNA, 4152 bp, Lactobacillus hammesii DSM 16381
ctgctggaagactttctagtgggtgtagaagtgtttcatagaaaaataggaggcgttatcgccatgaatcaggaaccatatgcgattggattagatattgggaccagctctttgggttgggctaatgcagacatggatggttatattgcccgagtgaagggacaaaccggattgggagtccgtctattcgaagaaggacagcccgccgcggatcgtcgaagctttagaacgacacgtagacgtttgagccgccgccgttggcgtttacggttattacgtgaaatttttgatgagccaatttcatccatcgatcctaacttctttgcgcgtcagaaggcatcgagtatttcgcctaaggatgatcgatttgagacaacttatcaattgtttaatgataaaactgatcaagagttttattcaaagtatccaaccatctatcatttgcgatgggcgctgatgacggagcatcgcaaatttgatttaagagaaatttacttagctgtacatcacattgttaagtaccgtgggaattttctgcgttctggaaaccccaaaagttttaagccaagtgaattagatttttcacaacggtttaaagaggttaacggactatggcatcttatctttgatgaggtggcaccacagttgcctacggacaacttggaagaaattacgaaactggtattagatacaacgcgcactcgagccgatcgtcagcgagagtcggttaagctgttaatggcggcgacagataatcataaggactggaagccgtatctaactgaatttactaaagcaattttaggcttgaaaacgaaactgtatctacttacaggagttgacgttgcaaaagcggatcaaaaaacttggacgtttagtttagaggacattgaagatcatcgggcagatttagaaacggcatttgatgaccggagtctggaattaattgaaaagttagttgatttacaagcagcaattcaactgactgaaattatgcccagcggacagtacttctcacagagtatgatatatcgatatgatcaacataaggaacatttacggtggttaaaggattatgcagaacagcaaacagatgctaataaaaggaaggctgtccggctagcttatgaccactacatcgagggagatgccaaaggaaagcctgaaattgctgatgacttttataaggaactgaatcgaatcctgaaaggcgacacgtcagaactcgctaaaaaaatcaatcatgagatcgcgttggagcattttatgcctaaacagcgaacaaaagaaaatggtgttattccctaccaaattcatcaacaagagctagactcgattattgataatcaaaagaaatattatcaatttttaggagaagataatccggtggtatctcatcatgggtcacagccatataaaattgatgagctagtgagtttccgggtcccctattatgttggccctatgatcacggcagaccagcagaaaaagacggcagcaggacaatttgcatggatggttcgtaaagacagtggtgatattacgccctggaactttgatgataaagttgaccggaccgcttcagcaacaaactttattcaacggatgaaaaccacggatacttatctgattggggaggacgtgttaccactacagagtctgacttatcagaagttcatggttctcaatgaattgaataatatccgaatcaatggcgaattgctgactcgtgagcagaagcagcgaacctataacgatgtcttcaaaggtcatggaacagtcaacgtaaaatccttaattaagagtttagaatgtcacagtgaggtcactggtgcgatcaaggtggaagggctagctgatcctaaacgttttaatagtgcgttaaccacatatcgtgactttaagaaaatcttaccagtagcgattgatcaaccgcaacgtcaggcggatatcgaaaggataattaattggtcaacgatttttgaagatgccgatatcttcaaagcgaaactacaagagatcgattggctgacagatacgcaacgtgatcgcctcagtactaagcgttatcgtggctggggacgtttgtcagccaaactattattgaatattaaggatacgcaaggtttatcaattatggaccagctatggaatacgcaacataatttcatgcaaattgtacatgagccagattatgcagagaagattgaaaagacgaatgccaaggggctgaaacaacaagatatatttgaaacaatcaacgaaatgtacacatcaccacaaaacaaaaaagctttgcgtcaaatcttagcagttgttcgtgatattcaaaaagcccatcacggtcaggcgcctagtcgaatctttattgaagcggcgcgaggagcagagcagaatcctcagcgaacgcggcaacgtcagaaacaattggcagatttatttgctgatcaagctaaagaaattgtcaatgaaacagtagctcaggagttgaatgatgagactgacaacaaggcacgattcacggaccgactcatgttgtatttcctacaaaatggtcaggatatgtatacaggagaaaaactgaatattgataaattatcgacctacgatattgatcacattttaccgcagtcgttagttaaggatgattcgttagataatcgtgtgttggttagcaaggtagagaatcttaaaaaaaatgatcattttgcctcagagctttatgccagaaaaatgcaaggaacatgggaactatggcggtcagcagggctaattagtgcgcggaagctgaaacatttattaatgcggcctgatgaaattaataaatatgctaccggatttatcagaagacagctggtcgaaacccgccaagtcatcaaattagtcacggatgtattgagtaatgaatatgattcagacaaaactaagattatttcagttaaggcgggactttctcaccagctacgaatggagctggacttgccgaaagttcgggagttgaatgactatcatcatgcttttgatgcctttttggcagttcgaattggaacctacttactaaaacgttatcccaagttggaacgtttctttgtttacggtcaatatcaggtagcgccacaattggacttacgccgttttaatttcattcatgacttggtttccggaaaacaagagaagatagttgccgaggagaccggcgaaattgtgtggaatcgtgagaaagatgtttcttacatgaaacatcttttgagcttgaaacatttgctggtgacacatgaagttaaggaagatcatggggccttgttcaatcaaaccatctataaggcaaaaaaggataatggcaatgttggcggtaagatgaagctacttcctactaaaagtaatcgaccgacagaaatttatggcggacattctagccaagcaatagcttatttagcaattgtcagagttaatggcaaggaaccttcgtacagagttatgggagttccaattaggattctcgatcagctgaagcaagctaagaagcagggagaatatgctgaaaggttagcgttaaagcagttctttacaccggactttactaaaggtaaaggaaaaattgtttcggactttgacgtagttattccacatattcccctgttacagcccgtgatagatgagatttcaggacagtcacataggtttgctttagggactaatacctattatcgaaatttacagcaattgattttaacgcttgctgatcaaaaggtattaatttcaaaagagacaggagtggatgaagagaagaagctcgtagaagtctattctcacatttgtcagcaagttatgaagtttttcccgttatacgatcggaataaatttagggaactacttgtagacagtcgatcccatttcgaacaattaccaattgttaatcgttattcagatgctgggaaactagagatagctggcaagcggggcattttacaacagataatggttggattgcatgccaacgcgacgcctggggatttgaaagaactaggcgtaaaaacgccttttggaaagctacaagttccaggcggcattaaattaactgagaatgctaagctgatttatgaatcgccgacaggcttgtttaaacgggaggtgaagataactaccgagtaa

SEQ ID NO: 321 - DNA, 4161 bp, Lactobacillus hominis CRBIP
atgacaaaaataaccgaagactatattgtgggcctggatatcgggactaattcttgtggctgggtagcaatggattcaaaaaatactattctgcgaatgcatggaaaaactgctattgggtctcacttatttgatgcaggaaattcggcagctgatcgtcgggcttttcgaacaacacggagaagaattaaaagaagaaagtggcgattaaagttattagaagagatatttgattctcatttggcaaaagttgatccatacttttttgctcgtttaaaagagtctggtctctcacctttagatacaagaaaaaatgtatcttcaataatttatccaacatctcttgaagataagaagttttatgttgataatcctactatttatcatcttcgttacaagttgatgactgaagatcgaaaatttgatttaagagaagtttatcttgcaattcaccatattgtgaaataccgcggtaattttttatataatacgcctgttaaagcctttgaagcttcaaaaatagatgtaaaaggtagcttaaagaaattaaatgagttatatgaaggattagactcagaatttaatgtagaacttgatagcaataatgcattagaaattgaaaatattattcgagataagaaaatcttcaagataaataaagttaaggaaattaaccaattactttctttaaaaactgaggataaggaacgtactaagttaatgaaggatgtttctaagcaaatagtaaatgctattttaggttataaaactaaatttgaaactattttattaaaagatgtaagtaaagatgaagcagacgattgggagtttaagcttactgatgtggatgcagataataagtttgaaaatctaattggggatcttaatgaaaatgaacaagaaattctgttagtaattaggaaattggctaatgcaattactttaagtaacattgtcgaagagggaaagactttatctgaatcaatgaaggataagtataagaaacattcagatgatttgaaattattaaaacaagttatttctgatcatcctgatcgagataaggctaagaaattagctttggcttatgacttgtatgttaataatcgacatggaaaaattcttcaagctaaagatatattagaaaagaagaaaactttatcaaaagaagatttttataaagaaattaaaaagaatctagatgattcaaaggaatcacaggaaattttagatgcaatttccttagattcattcatgccaaaacagagaacaaatgagaatggggtaattccatatcagcttcatcagcttgaattagacaaaattattgaaaatcagggaaagtactatccgtttttgaaagaggtaaatcccgtttcttcacatttaaagcaagcaccatataagcttgatgaactaattaggtttagagttccttattatgtaggaccattaatttcaccaaacgaatctactaaaaataaacaaacaaagaaaaatcaaaattttgcttggatgatacgtaaggagcaaggacagattactccttggaattttgatcaaaaggtagatcgaatggcgtcagcaaacaagttcattaaacgaatgacaactatagatacttacttattaggtgaggatgttttaccagctaatagtttactttatcaaaagtttacagtattaaatgaacttaataacgtaaaaattaatggtaaacgaatatctgtgcctttaaaacaagaactatataataacttgtttaagaagaattcaactgtaactactaataagcttaaatcctatttgaaagaaaattataaacttattaaagttgagattaagggcttatctgatgaaaagaaatttaattctggattgacaacttataataaattaaaaaatttgaagatttttgatcaacaaattgatgatcctaactataataaagatttcgaacggatcatcgaatggtcaactatttttgaagataaggctatttataaagaaaagttgaaaactatagactggctaagtgatagacaaattgacaaactaagcaagattagaatgcaaggttggggtcaattatcgaagaaattattatcacaattaactgacaataatggtcaaactattattgagcaactttgggatagtcaaaacaattttatgcaaattgtaaatcaagctgattttaaagatgctattgcagttgctaaccaaaacttactagttgatacaagtgtagaagatattttaaatgaggcttatacgtcaccagctaataagaaagcaatccgccaagtagttaaagtggttgatgatattgttaaagcaacttcaggaaaagttcctaagcagatcgcaattgaatttaccagagatgcagacgataatgctaaaataagccaaagtcgagcaaataaattgcgtaaagtctataaagaaatgtctaacgaattagcgtcagaaactatcagaaatgaattggaacgggttgctaaagatcaaaaattgctaaaagataagcactatttatactttatgcaacttggtagggatgcttatacgggtgaactaattgatattgataatctagaacaatatgatatagatcacgttcttccacagagctttattaaagatgattccttggaaaaccgagttttagtaaaaaaagcagtaaataatggcaaatcggataatgtaccagttaaattatatggaaatcgtatggcaactgacttaggaatgacgattcgtcatatgtgggaaaaatggaaagagcaaggattaattacgaagactaagtataataatttaattattgatccagataagattaataaatatgaatcttcaggcttcatacacagacaactagttgaaacgagtcaaattattaagttagtttcaacaattttacaatctaagtatcctgatactgaaataatagttgttaaggcgcgatataatcattatttacgaaagcgcttgaacttatataagagcagagaagtaaatgattatcatcatgcaattgatgcatatctttcagctatttgtggtaatcttctttatcaggtttatccttatttacgtcctttctttgtatatggacaatataaaaaatttagttccgaacctgaaaaagaaaagataatttatgataaaacaaggagatataattttatttcgcaaatttttgaaaataaggataacgatattatcagtcgtgaaactaagaaaaaggtttttgataaaaaagatataattgaaaaattgaaacgtgcatataactataaatacatgcttgtttctcgagaaaccgaaactcacgatcaggaaatgtttaagatgacggtctatccacgtttatcacgtgatacaaagaaatcacgtaatttaattcctaaaaagaaagatatgcctactgaaatatatggcggatatacaaataattccgatgcctatatgattattgctagaattaataagaaaaagggccccgaatatcgcgtgttcggagtaccaatgcgtgaattggttaatttaagaaaagctgagaaaaatggtcactataaggcttatttaaagcaggtacttgaacctgaaattatgtatagcaagaatggaaagaaaaataaaacaattagttcatttgagattgttaaagcaaaagttccatataagcaagtaattttagatggtgacaaaaagtttatgcttgcaagttctacgtatgtccaaaatgctaagcaattaactttatctcaatattctatgcaagcaattactgataattgtgaaaatgataccgaagaggagaaagctttggttgaagcatatgatgaaattcttacaaatattgataaatacttaccattgtttgatattaataaatttagagaaaaattacatgctggaagagaaaaatttgttgatctaccattagctgagaaaaaagagacaattttacaggtattaaatggattacatgataatgctgtaatgcctaagattaagtctttaggattatctacgccattaggctttatgcaatttcatactggcgtatcactttctgaaaatgcaaaattaatttatcaatctccaacaggtttatttgaaaaacgccttaagatttcagatttgtaa

SEQ ID NO: 322 - DNA, 3900 bp, Lactobacillus hordei DSM 19519A
aaatggcgtttaggccttttggaggaaatatttgcaccatacttagcacagggggatccatattttttagcacgtatgaaggaatcaaatatttcaccacgagatgaacgcaaaaagtattatggttcactacttttttctgatgataccgttttttatgataaatatccaacagtttatcatttgagacatgccttaatgacagaggatagaaagtttgatattagagaaatttatttggctgtgcatcatattattaaatatcgaggaaacttcttaattaatactttgataaatgaattttcttccaaagcagttgattttaagaaagatgctgatatattaaacgatttatttgagcaattttatatttctgatattaacgattcttttcaattgaatactgctgacatgaatgaaattagtgaattattacttgataactccaaaactagacttgaccgtcagcgtgaaagtttaaaaaaactagcaaaaaaggtagatgatatatctgtcgctaaaaagcatcaaaaaattgcaacggaattcagtaaggcaattctgggaaataaagctaaatttgatgtcattttaaatgttactacagatagttcgaatgattggtcttttaagttagaagatgaggatgcagacgaaaaaatcgtcgttttgctggaagaattaaataccccacagcaggaagctttgaatattattcatcaatggtattcacagatttccttgaacggaattgttcccgatggaaaatcgatttcagaagcaatgattagtagctatgaactacataaagagcatctagcacttttaaaacagcagattaataatactaaagataaaaagaaagcacatggtttacatgaggcatataacgaatatgtacatggaaataataacaagaaactaaatcaagcagatttttattctaaggttaagcaaaatctagaatcatctttgattacggatgaaattctagaattgattaatgctgagaattttatgcctaaacagcgaacatctgctaatggtgtgatcccacatcagttacatcagcaagaattagacagaattattcaaaatcaagcaaagtactatccgtttttggcagaaactaatccgaatgaaaaacggagtaaggttgcaaagtataaattggatgagttagtagcctttcgtgtgccatattacgttggaccgcttattacagcaactgaccaaaagaaaacttcagggaaagaatttgcttggatggtacgtaaacagcctggtagaatcacaccatggaattttgatgagaaagttaacaaaatggagtcagcaaatacttttattcgacgtatgacaacaaaagacagttatctaattgcagaagatgttttacctgatgaaagccttctttaccagaagtttaaagtgttgaatgaattaaataacttgcgagctgatgggcgtaaactaaaagtttctgttaagcagaaagtttttaaagagttatttcagcaacaaaaaactattacaatagttaagttacaaaattatttaaaagctgagtgcagctttttaactactcctgagattagtggcttatcaaaaccagagcattttgtctccagtctagcgacctatattgatttaaaaaaaatttttggcgaagatattgataatcctgctagacaaaatgactttgaacgtatgattgaatgggcaactatttttgaagacaaaaatatttacagtgaaaaattaaatgaaattaaatggttaaacgataggcaaaaaaaagaattaaaaaataaaaattaccatggttggggtaaattatcagccaagctacttaaaggcttaagagattctgatgaatgctcaattattgagcatatgtggaatactcaacaaaactttatgcaagttcaagctgaagaagatttcgcacaacgaattcaagaagaaaataatcagcatttaaaaggaaatactttagaagaagttttggcagatgcctatacatctccgcaaaataaaaaagctattcgacaagtagttaaagttattgaagatattcaaaaagctatgggcggaatagctccgcaaaaaatatcaattgaatttactagagcgcccgaagaaaaaccgcgtcgttctgtcgagcgacagcagcaaattgaaaaaatttataaaagcgttgcaaatgaggtcgagaacgctggagtaaaggatgagttacaacgtttttctgacagaaaacagactttaactgataaatatttcttgtactttacccagcttggcaaagatatgtatactggtaagtcaattaacattgatcagattggtaattatcaaattgaccatattctaccgcaagcatttattaaagatgattcgcttgataatcgtgttttagtgagtgcagccgtaaataatggcaaatctgataatgttcccacaaaaaatgataggtataaagtgcgagaacatgggcaaagactgtatgatcaggggttgatatccaaacgaaaatttaataatttgataactgatcctgattctattaataaatttactgcaagaggatttgttaaacgacaattggttgaaacaagccaagttatccgactagttgctgagtttttgtataacaaatatcagagtaaaagtgagatcattgaagttcgagctaaaatgaattcacagttacgtaaggattttggattaatcaaaaaccgaaatgtcaatgattatcatcatgccttggacgcctatttaactacctttatcggaaattatctttatcggcgttatccaaaattgcgtgcatatttcacttatggatgctttaaaaaggttgatgattcccaattaaagtattttaattttttgcatgatatagaagatgataagaaaaagatcattaaggataatgatacaggagaaattctctggcatcgtgatgaaggaattgcacgatttaaaagaatttataattttaaatatatgctggtaacgcatgaagttttgactagacaaggtgcgatgtttaagcaaactgtatactcggccgcagtagcaggaagcaaaaaattgattcctgttaaagaggatcgaccaattgatatttatggaggatacaccaataataatgatgcttttctggcaatcgttaaagttactaagaaaaagcaatatatggtagttggtataccacaaagagcagtagttaaactgaatgatgccgcaaagcaaggtagtaaagcataccaaaaagttttatacaatgttataaaaccacaatttattaagaaaaagaaagatagaaaaaccggtaaaattacacaaaagttagagaattttgaaatcgtggtttccaaaactctatatcgacagctgattattgatggtgatcagaaatatatgttgggaagttcagcgtataaatataatgctaagcaactggtcttatctgagtatgcattggaagttttagatagaagtatttttgaaaaaaaagaatacacaactgttgatttagataatgtttacgatgaaattcttgcacaggtagacaaatatttttctttatatgacaaaaataaatttcgccagaaattacatgaaagtagaaagatttttactgaattaccaataaataatttattctcaggaacaaaattattaaaaagcggcaaacgtgagacgttgaatgaaatattggaaggattgcatgcaaatgcaactaagaaagatttaaaaagccttaaattttctacaccacttggaatgatacagtatccaagtgggattatactttcggaaaacgcaattctatgttatcaatctccaacaggaatttttgagcgaagagtgacacttaaagatttgtag

SEQ ID NO: 323 - DNA, 3513 bp, Lactobacillus hordei DSM 19519B
atgtcaaagtataatgtaggattggatataggtattgcatctgttgggtggtcaattgttgatgctgacaaaaagaaaattattgatttaggtagtcgtatattttcatcaggaaatgcagcggctaatcaagagcgacgtggttttaggggaacaagacggttgattagaaggcgaaaaaatagattaacagatgtaataaatttttttggagaaaaaaagtttatagatactaaagttgtagataaaaatggacatgtacattataaattttcagtaaataatacagaaagtccctatgaattacgtgttaaagggttatctgaaatattaacaaagcaagaacttgttattgcactttaccatattgtcaaacatcgagggatctcttatgatttaggcgatttggaagatgatggaacaagtggagtgaccgattataagacctcaattaatattaatcgacaattgttaaatgaaaaaacagttggccaaatacaactagaaaggctaaatgagtttggtaaagtccgaggacaggtagaagaaaatgaaaatgtaacattgctcaatgtttttccttcagcggcatatgtcaaagaagctacacaaattttaacgaagcaaagagaattttatccagaaattacggatgactttattgcaaagttcatgctgtttattactcgtaagcgtgattactttgttggacctggaaatgaaaagtcccgtacagattatggaatttataaaaaggatggccgaacactagacaatctttttgatgagctcataggaatagataagataaatggagagaaaagggcgtcagcatcaagtttgacagcgcagatatataatatgttaaacgacctgaataatttaacagtaccgaatactgaagatggaaggttaacaattcaaaccaaaaaagaaattcttgaagcagctaaaactacgaatggtttgtttggaatagctcaaatttgcaaaattataggttgtaaaaaggatgatattaaaggttttcgaattgataagtctgaaaagaaaattatgcatactctttctggttatcgaaaatttcgtaaagaacttgctgatgttaatatagaagcaaatgatttgaatattaatttagttaacaaaattgctgatatcctgacacttaatacagaaaaagctgaaattcgcaaacaattagacaaaagtaatatggatatctccaatgaaatgaaagagattgttattaataaaaataaggagtttttagtagatggtcgagcaacatggcatagtttctcctataaaacacttaatttacttataccggaattattaaatacacctgaagaacaaatgactattttgacacgcttaggtcttgtaaaacctaacaataaaaaatatgaaggcctgaagaatattcctgcacggagaattacagaagaaatatacaatccggtagttgctagagctactcgtgaagctgttaatgtttttaatgcaattaccaagaaagtaggacgtgacaatattaaggatgttattattgaattaccacgtgaagataacgaagtagacatcaaaaagggcattgtcaaaagacagaaacaaaatgaagtagaaaaagagacggctgatgcattagttaagcaacatatgacaatatcagatagtgcattaattgcacagtatcgtaaaattagaggactatcgcaaaaagtacggtattggtatcaacaggatacgatttgcccttattgcggtaagaaaattgaggctgttcaattaatcaataataatgatagttttgaagttgatcatattgtaccaatctcagttagttttgatgactctcaaaataataaagtcctggtacatagtcagtgtaatcaagcaaaagaaaaacaaacaccacttggttggttaaataatggtggtgggtttggtcaaagtaaagctgactatattgctagagtgaagtcaaataaaaattatgcaaaaaataagattgataatttgttgaatgagacagatcttaatgacattgctacacagcggggctttattcaacgtaatcttaatgatacgcgttatgcctcacgtattgtactcaatgaattttactctttttttcgatctaataacttgagtacaaaggttaaagtggttcgtggaaaatggacatcacagatgcgcaagaagtggaatggagtaggtggactatctaaaacgcgtgatacataccatcatcatgcaatcgatgcttgcattattgcatgtttcccattattaaaggcatttgataaggctataaagttaattgatgttgacggagaaactggggaaatactacaagataaaaaagcaataaaattggcacaggaagcagagatagtagaaaaaatatctgttattaaaaataaaaagttcgagaatatggttaatgagatttataattttccgctttttaaacaggtggaattagcaaatgatatcaccaatttggaaaatcctgtaaagttcagtcatcatgttgataagaaagctaatcgtgcagttgcaaatcagacaatttatggaacacgtattaaagaaaaagaagtaactaagcgtggaaaaaaggaaaaaatacaagaaagatatacgttaggtacaattaaaaatatctatgatattgatggctttatgaattttaaaaaattgtacgataaaataagtaaaaatgatgatgtgaagtttttaatgcagaaaaatgatccgaaaacatgggaaaaattgattgatatatttaattcttatcctgattcagaagaagttactcaagtggatggaaaagttaaaagagttgcagtttctccatttaaactttactatcgtgagaatggttttatcactaagtattctaaacataatgatgggcccaaggtggtaagtataaagtattatgattcaaaggtggggagtcacattgatattacacccaaagatgcgagaaataaggttattttacagagcttgaagccatggagaacagatgtctattttaattcaataactcaacaatatgagttacttgggttaaaatattcggatttaaaattcacaaatggtgtttacgggataactagagatgcatatgagaaattaaaacatggtgtaagcgaagatggtgtaacagcatggaagcctattagtaaaaatagtgaatttagatttagcttgtatcgaaatgatcgagtaagggtcattgatgaaaagggtgactcaatcgaattattatttgcttctagaacaacaagtaacgagggctatgttgaactgaaaccaatttataaagctaaatttgatagtaaagaagaagttggtttttacggacttgtttcaaacggacgactcattaagaaaatgagcaagggagggtataaactttataaagtaaatacagatattcttgggaaaccatattatgttacaagagaatcagatgagccaaagttaagtttgtag

SEQ ID NO: 324 - DNA, 4188 bp, Lactobacillus jensenii DSM 20557
atgaaagaaataaaagactacatcattggtctcgatatcgggacaaactcatgtggttacgtagtaacagataaacaaaataatattttgaagctaaaggggaagactgctatcggcgcacgcctttttaaagaagggcaagctgcagctgatagacgttcttttagaactactagaagaagattagcaagacgtcactggagattaggtttacttgaagaaatctttgatccagaaatggaaaaaatagatcctaatttttttagaagattaaaagaatcagactattctcctaaagatagtcgtaagcaatttaatgcaattgtttttaaaagtataaaagctgacaagagattttataaaaaatatccaactatttaccacttacgtaatgctttgatgcatgataatcaaaaacatgatttacgcgaaatatttatggctgttcaccatattgttaaatatcgcgggaactttttaagagaagattcagttaatgcttttaaagcagctaagttttctttgcgtggtgaagatgggattggacctgttgataaattaaatgatttgttgaaagaaatttattctgaatattcaccagaacttgcaactaataatttatctaagattgaagatattattaaagataaaaacttatataagcaagacaagcttaaacaagtagcgactttgttaattaaagaagctgattcaaaggataaagctaagcttaataaagatattgctaaacaagttgctaactcttttatgggctatatgtttagattagatacactctttagtcttactgatgttgatgtgaaggactataaattaaaatttagcgatgctaatattgatgaatctttggatgatttgactagtttattgacagatgcacaaatagaatttgtattagaactgcaaagcatttataatactatagttttaaatgagattgttccagatggaatgagtctttctgaatcgatgattaagaaatatgatgatcataaggaagacttgaaaatatttaaagaatatattgattctttaagtgatcagaaaaaagctaaaaaactgctatcagcctataatttatatgttaattatcgtaaatctgatttagtagaagctaagaatttgtttaaaaataagaaggtaggggacaaaaattttgccgatgtaataagcaacttcgaagtatttggcaaatttgtttctgataatttagatgattcagaattagctaataagattaaggctagacttgatttaggtgaatttttaccaaaacaaagaaccaatcaaaatggagtgattccatatcaattgcatcaagttgaattgacgcaaatacttgaaaaacagggaaagtattatccattcttgattacacctaatcctgtagaaagtcatagaaataatgctccttatgaaattagtgaacttgtatcattccgggtgccttattatgttggaccattaattgataatcaaagtattaaagataaacaaaataaaaataagtttgcctggatggtacgtcaaaagcaaggtcaaataacgccttggaatttggaagaaatggttgatactacagaatcagctaatcaatttatcaagagaatgacaaggaaggatacgtatttattagctgaagatgttttaccaaaatctagtttagtttatcaaaaatttatgatattagatgaattaaatagaataaaaattgacggcaaaaaattaacaagtgaactaaagcatgatatttttgaaaaattatttaagaagcaaaaaagcatcaatttagataacttaaagaattatttattagtagagggcaatattccaggtttgattgagggcctttctgatggaattaattttaacaatagtttttcaacttatattgattatcgtaatatctttggtgatgagattgataatcctaataagcaagctgacttcgaaaagatgattgaatggtcaactgtgtttgaagaccgtaagattttcaagcggaagctaaaagaaattacttggctaacatctgaacaaattaaacaagtaagtagtaaacgctattcaggatgggggagattatctaagaagttattaactcaaattacggatgaaaatggtgttaatatcttgcaaagactctggaatgaacctgaaactttaactgaagttttagctaatccggttataaaaagaaaaattgtagaagctaatagttcctttactaaagcgaaagatatgaaagatatcttggttgaagcatatacttctccacagaataaaaaggcaattcgtcaagttatgcgagtagttgatgatattattgccgctgctcatggtaaaaagcctagtcaaattgctattgaattcgctcgtgaagatcaagataatccacaaatgactaagtcacgtaaggctcaacttgatcagatatatgccaagattagcgatgagtttttagatgatgcggttaaaaatgaactaaagaatatgaaagataataagcctttggctaaggacaaggtgttcttgtactttaagcaaatgggtagggatgcctatagtggtgaaaaattatctttagataacttgcaagattatgatattgatcatatttatccacaatcatttattaaagatgattcctttgataacagagtacttgttcaaagagcttataacaacggtaaatctgataatgtgccagtactcttatttggaaataaaatagctgcaggtttgggaattactattcgtcaaatgtggaagaaatggcttgaacttggacttattagtaaacgtaaatttaataacttgattacagatccagaaaagatttctcgaaatatggcttcaggattcgtaaaccggcaattagtagaaactagtcaagttattaagttagttgctaatattttgcaggctaagttacctgatactgagattattgaagtaaaagctagctacaattctatcttgcgtaaggaatttaacttatacaagagtcgtgaagttaatgattatcaccatgctattgacgcatacttaactacgattgttggtaattacttgtatcaagtctatccaaaacttagaccatactttgtatatggacaatttaagaagtttggcaaagctgaaaatcaagaagatgatccagttaagaaaattaagaaattcaactttatttatcagttgatttggggtaaggatgatgcaatttgcattagccataccaatcaacaagtctttagtaaaaaagatattattgacaaattaactactgcatataacttcaagtatatgaatatatcacatgcagtttacacccgtaataataatatgtttaaacaaacgcttttcccaattattgaacgtactacggctaaaaccaaaagtttgattcctaagaagcttgatcgaccaactgatatttatggtggatatagtaataataatgatgcataccttgcattagtcaaagtagataaaaagagggggtcagaatatcgcgttgttggtattccgatgagagctgctgccatgcttaaagcttcaaagaattatgatgaagatttacgcaaagttattgaaccaatggtaatgtttgataagaatggtaaggctaaacgtggaattgaaggattcagagttttagttggtaagatgccatttaagcaagctgttcttgatggtaataagaagtttatgctaactgggactgttgatacaccgaatttaaagcaattggtgttgtcacagcaaaatatgaaatatattcttgattatattgaagatgttgattgtcgaaaacataaatttggtgataaggttcaaaatccagataaatgtctacttgaagtattcgatgaaattattgaaatagttgataaatattttgaattgtttgatagcagagattttagagaaaaattgcggaacagtagaaataaatttataaaattagaagcttctaagaaggctgatacaatattagcaattcttaaaggccttcaggcaaaatcaacgagggcaacaattaaagaattaaatatatcagattttggaagaattataacttcgagtatttccccagaagcacaacttatctatcaatctccaacaggcttatttgaaagacgtgttaaagtcaaagacttataa

SEQ ID NO: 325 - DNA, 4128 bp, Lactobacillus johnsonii DPC 6026
atgaccaaaattaaagacgactacatcgtaggattagatattggtactgattcatgtggatgggtagccatgaattctaacaacgatatcctcaaactacaaggtaaaacagcgattggatcgcgtttatttgaaggtggaaagtcagcagctgagcggcgtctgtttagaacaacccatcgaagaataaaaagaagaagatggcgtttgaaattattagaggaattttttgatccttatatggcagaagtagatccatatttctttgctaggttgaaagaatcaggcctttctccattagataaaagaaaaaccgtatcttcaattgtttttccaacttctgctgaagataagaaattttacgatgattatcctactatttatcatcttcggtataaattaatgacagaagatgaaaaatttgatttaagagaagtctatctagcaattcatcacattattaaatatcgtgggaatttcttatataatacatcggtaaaagattttaaagcatcaaaaattgatgtaaaaagtagcattgaaaaattgaatgagttatatgaaaatttgggtttagatttaaatgttgagtttaatatctctaatacagcagaaattgaaaaggttcttaaagataaacaaattttcaaaagagataaggttaagaagatagcagaattatttgctatcaaaactgataataaagaacaaagtaaacgtataaaagatatttctaaacaagtagccaatgccgttttaggttataaaacaaggtttgacactatagcactaaaagaaattagtaaagatgaattatcagactggaattttaagcttagcgatatcgatgcagatagtaaatttgaagcattaatgggtaatcttgatgaaaatgaacaagctattttgttaactattaaagaattgtttaatgaggttactctgaatggaattgttgaagacggaaatactttgtctgaatcaatgattaataaatataacgatcatcgtgatgatttaaaattgctaaaggaagttattgagaatcatattgatcgaaagaaagccaaggaattagcattagcttatgatttatatgtcaataatcggcatggacaattattacaagcaaagaaaaaactgggaaagatcaagcctagatcaaaagaagatttttataaagtagttaataaaaatttggatgattctcgagcatctaaagaaataaaaaagaaaatagaactagattcctttatgccaaaacaaaggactaatgctaacggtgtaattccttatcaattacagcaattagaactggataaaattattgaaaatcagagtaagtattatccattcttaaaagagattaatcctgtttcgtcacatttgaaagaagcaccgtataagctagatgagttaatcaggtttagagttccatattatgttggaccattgatttcgccaaatgagtctaccaaagatattcaaacaaagaaaaatcaaaattttgcatggatgattcgaaaagaagagggtcgaataacaccatggaattttgatcaaaaagttgatcgtattgaatccgctaataagtttattaagcggatgacaactaaagatacttacttatttggcgaagatgtcttgcctgctaatagtctcctttaccaaaaatttacggtgttaaatgagcttaataatatcagaattaatggtaagcgaatatcagttgatttgaaacaagaaatatatgagaacttgtttaagaaacataccactgtaacggtaaagaaattagaaaactatctaaaagaaaatcataatttggttaaggttgaaattaaaggattagccgatgagaagaagttcaattctgggttaactacatataatagatttaaaaatttgaatatttttgacaatcaaattgatgacttaaaatatcgaaatgattttgaaaagattatcgaatggtcaacaatttttgaagataaatccatctataaagaaaagctgagatctattgactggctgaatgagaagcagattaatgctctaagtaatattaggttacagggatggggtagactatctaaaaaattattagctcaattgcatgatcataatggtcaaactattattgagcaactttgggatagtcaaaataattttatgcagatagtaactcaagctgactttaaagatgcaattgcaaaagctaatcaaaatttattagttgctactagtgtagaagatattttaaataatgcttatacttcacctgcaaacaaaaaagcaattcgtcaagtaattaaagtggttgatgacattgtcaaagcagcttctggaaaagttcctaaacagattgcaatagaatttactagagatgccgatgagaatcctaagagaagtcaaactagaggaagtaagctgcaaaaagtttataaagatttgtcaactgaattagcatctaagacaattgcagaagagctaaatgaagctattaaagataaaaaacttgtgcaagataaatattatctatattttatgcaacttggtagggatgcctatactggagaaccaattaatattgacgagattcaaaaatatgatattgaccatattttgccacaaagtttcattaaagatgatgctttagataatagagttttggtttctagagcagtaaataatggtaaatcggataatgtaccagtaaaattgttcggtaatgaaatggctgctaatttaggcatgactattagaaaaatgtgggaagaatggaagaatattggtttaattagtaagaccaaatataacaacttattgacagatccagatcatattaataaatataagtctgcaggttttattcgacgtcaattagttgaaacaagtcaaattattaaactagtttcaactattttacagtctcgctatcctaatactgagataataaccgtgaaagccaaatataatcactatttacgagaaaagttcgatctatacaagagtagagaggtaaacgactatcatcatgcaatagatgcgtatctttcagcgatttgtggcaatcttttatatcaaaactatcctaatttacgtccattctttgtttatggtcaatataagaaatttagctctgaccctgataaagaaaaggcaatttttaataagactagaaaattctcttttatctcacaacttttgaaaaataaatcagaaaatagtaaagaaatagctaaaaaattgaagagagcatatcaatttaaatatatgcttgtctctcgagaaacagaaactagagatcaagaaatgtttaagatgactgtctatccacgattcagtcatgacactgttaaagcccctcgtaatttgattcctaagaagatggggatgtcgcctgatatatatggtggatatacaaataattctgatgcttatatggtaattgtgagaatagacaagaaaaaaggaacagaatataagattttaggaatacctaccagagaattagttaatttaaaaaaggcagagaaggaagatcactacaagtcttatttaaaagaaatacttacaccaagaattttgtataacaagaatggaaaaagagataaaaagattacctcatttgaaatagttaagtcaaaaatcccatataagcaagtaattcaagatggagataagaaattcatgcttggtagctcgacatatgtatataatgctaaacaactaacattatcaactgagtcaatgaaagctattacgaataattttgataaagatagtgatgaaaatgacgcattgatcaaggcttatgatgaaatactggataaagttgataaatatttgcctttatttgatatcaataaatttagagaaaaactgcattcaggaagggaaaaattcattaaattatctctagaggataaaaaagataccatcttaaaagttttggagggattgcatgataatgcagtaatgacaaaaatcccaactattgggttgtcaacaccattaggatttatgcagtttcctaatggcgtaatactctcagaaaatgcaaagttaatttatcaatcaccaacaggtttatttaaaaagagcgttaagatttcagatttgtaa

SEQ ID NO: 326 - DNA, 4026 bp, Lactobacillus lindneri DSM 20690
atgacacagaaagtaataccgtataacatagggttagatattggaactaattcagtaggttgggcagttactgacaatgaaaataaattattacatattaaaggacacaatggaattggtgttcgattatttaaagaaggacaatcagcggctgaaagatgtggttttagaactacaagaagacgattatcccggagaaagtggcggttgcgtttattaaacgaaatttttgctgataaaattgcaaaagttgatcctagcttttttgcaagattgaaacaatcaaatgtttcaccaaaagatccgaacaaaactatgtttggaaatattttatttgataatggaaatttaaatgataagtcttttcatgatgagtataagactatttatcacttgcgacagtcaattattgatcatccagaaaagaagtttgatattagattaatttatttagcaatgcatcatattattaaatatcgtggtcattttttgaatcaagcaaatgttcaagattttaaaggtggaaaaattgatttagaagaatcttttaaagatttaaatagtatttttgaaaatcaaggtcgtgacttacgattggttactgaagatgctaataaatatgtaaaagaacttagcgacaattcaaaaactagaaatgaccggcagaaagaattatcaaaagttttgtacattccaattgataaaaattctgataaaaacaataaaaaggttaccactgaaataataaaagctattttaggtatgaaagcaaaatttgatgttatttttgggattgatgctgaaaatgccaaagaatggagcttaacttttaatagtgatgattttgacgataaaattgaaggattatcagctcaaatgaccgatgaagctggggaaatccttttgattttaaaagaactttattttgctttaaacttatctgatattttaaataactcggttactgataaaaatgctaaaactttatctgaagcgatgattaatcgttatgatgatcataaggaacaattaaccatgttgaaacaggttattgataactctgacaaaaagcatgctaaagcattaaaagctgcctattcagcttatattgatggtgaaaataataaaaaaatttcttttgaagatttaagaaaacgaattcaaaagaatttagataattcagaaacctcaaagaaaataaatgatttattggaacatgattattttttaccaaagcaacgttctaaagaaaacggtgcaattccacatcaattacaacaacaagagttggataaaattattgaaagtcaaaagcattattatccctttctggctgaattaaatcctaatgaaaaacgtagtcgacaagctaaatataaacttgatgaattagttgctttccgagttccttattatgtgggtccgatggtgaaagccactgaaaataatcagagtaataacggtaagtttgcctggatgattaagaatgataatatttcagataaacttaaaaaagaagaaattactccttggaactttgataaaaaggttgaccgaactgaaacggcgactaagttcattactagaatgactacaactgatacatatttaattggtgagccagttttacccaagaatagtttgttataccaaaagtttgtagttttaaatgaattgaataatttaaaaattaataaacaaccaattacacccgaacaaaagcaatatgtttatgagcatgttatgaaacaaactaaacgtgtctcattgaaaaaaattgcggatgctctagtgattaaaggtgattatccttatgcaccagaaataacgggaacaacagaccaaaaaaatatgaataatggtctatcaacatacattgatttagctaaaatatttggcgatgagttagatgatattgatagaaaagaagattttgaaaaaataattgaatggtcgactatttttgaagatcagcatatctttgctttaaaacttaaagagattaaatggcttaccgaagaccaacgtaaacaagtagttaaacttcgttaccaaggttggggtaaactatctaaaaaattacttgccgatttagttgatgataatggtcagcgtattattgaccttttgtgggattcaaagcaagactttatgcaaattgtaaatcaaaattcatttaagcaagccatagcagaacacaatggcgctcatttagaagaaaaagatttaaaagatattattaataatttgtatacatctccacaaaataaaaaagctatccgacaagtcattttagttgttgatgacatcattagggctgttgggtatgaaccagttaatattatgatggaattcgctcgtgaagattctaaagaccatcgcttaaccaattctcgaagtcgtcaattagaaaaggtttataaagatattactaatagttggtttgatgacgataatgttaaagatgaattaaaagataagattaaagataaagctaaatttactgatcgtttatatctctattttacccaagggggaaaagatttatatactggtgaacctttagatattgataatctatctaattatcaaattgatcatattttgccacaatcatttattttagataattctttagacaatcgggttcttacttctaagataaataatcaaattaaaaaggataacttgccgggtgaattttttggttctaaaatgcataatttttggaaacatttgaaagaattacatttaattagtaataaaaaatactataatttaacgcttactcctaactcaattagtaaatttaataatcaaggacgttttattaatcgtcagttagtcgaaacaagacaagtgattaaattagctgctgaaatactccataaccgttattctgaagaaaatggaactaacattgtgacagttaaagctaacttaactcaccatatgcgagaaaaatttaatttttataagaaccgaaatgttaatgattatcatcatgcgtttgatgcatatttagctgcctttgtagggaattggctcttacaacaatatcctaagttaaaaccatattttgtgtatggtgattttgctaaaactgaaattgataatttgaaatcatttaatctgatttataagtttgaacaagctcatcaattaaatgaagaagatggaaaaattgctaaagatacggatgctttattaggttatatgaaaaatgtctatcactttaagaaaatgttggttactaaagaattggaaaccaatcatggcaatttgtttaaacaaactttatatccctcccatggtaagatgaaaaatttaattaatccaaaagaaaataggtcaagtgatatttatggtggatattcttcagaaacaggagcttatgtttctttaattaaagtatttaaaaagaataaaattgaaaacaagattatcaaaattcccttactgtatattgataaattgaataggcaggcaaacgctaagcaatttataagaaattttataattaaagatgattcaaataaatttgatatcttatcagaaaaaatatttcttaatcaattagtaattgatggtgatgagttgtttacaatttctgggagtggagatagacaaaatgctcagcaattaattttatctgataaatcactgaaaattttatctaaaaacattaatgtaattagtaagaatgatttaattattatttttaatgaaattattgatgatatttgtaaatatatgaaaatgtatgaagttgagaattcagatgaaacaaaagctaagtttgaagaaattaatgataaagatcgtatgttaaaaataataaatgatttattactaggtttacatgcaaatgcttctaggtctaatctatcttctattggtctatctccaagttttggtagattttttagcggtaatgctggaattaaattaagtgaaaatgcaaaatttatttatcaatcaccaacaggtttattttcaagaaaagttaaaatttctgatttgtaa

SEQ ID NO: 327 - DNA, 3525 bp, Lactobacillus mali ATCC 27304
atgggaaagtatagtatagggttggatattgggatttcttctgttgggtggtcgattattgatattgagaagaaaaaaattgttgatttaggcagtcgtatttttccatcaggaaatgcagcggctaatcaagatcgtcgcggatataggggaacaaggcgtctgattaggagaaggaaaaatagattagcggacgtaataaattttttaggagaagaaaattttatagacacaaaagtagtagatcaaaatgggaatatacactacaaacttttagtaaatagtactgaaagcccttataaattgcgtgttaagggtttgtccaaaatgttaacaaagcaggaacttgttattgcactttaccatatcgtaaaacatcgaggtatttcttatgatttaggtgatttggaagatgatggaacaagtggtgtaactgattacaagacttcaattaatattaatcgtcaattgttaattaaaaagacagttggtcaaatacaattggaaaggttaaaggagtttggtaaagttcgtggacatgtaaaaaaagatgaaaatataactttgctcaatgtttttccttcatcggcatatgttaaggaagctacacaaattttgacaaagcaaagggaattttatccagaaattactgatgattttattacaaagttcataccattcattagtcgtaaacgagactattttgttggacctggaaatgagaaatcgcgcacagactatggaatttataaaaaagatggtcgaacattagataatctttttgatgaactcataggaatagataaaattagcggagaaaaaagagcatcagcatcaagtgtaactgcacagatatataatatgcttaatgatttgaacaatttaacagtaaccaatactgaagatggaaagctaacaactcaaacaaaaagggaaatcattgaagcagataaaactacaaatggtttgtttggaataacgcaaatttgtaaaataataggttgtaaaaaagatgatatcaaagggttccgaattgataaggttgaaaagccaattatgcatacactctctggttatcgaagatttcgtaaagaacttgctaagattaatatagaagcaaatgatctggacattaatttagttaacaaaatcgctgatattctgacacttaatactgagaaagctgaaattcgtaaacaattgaataaaagtaatatagatgtctccaatgagataaaggaacttattatcaataaaaataaggattttttggtagatggtcgagcaacatggcatagcttttcttataaaacacttaatttacttataccggaattgatgaatacttctgaagaacaaatcactattttgacacgtttgggtctggtgaagtctaatagtgaaaaatataaagggctcaaaaacattcctgcacgaagaattacagaaggtatatataatcccgttgttgctaaagccacacgtgaggctgttaatgtttttaatgcaattgctaagaaaatagggcgtgataatattagcgacgttgttattgaattaccacgtgaagataatgaggcagatataaaaaaaggtattgttaaaagacagaagcaaaatgagttagaaaaagaagctgctgatgcattagttaaacaacagatgacgatatcagacagtgcattagttgcacattatcgtaaggtcaggggcctatctcagaaggtgcggtactggtatcaacaaggtacttgttgcccttattgtgggaaaaatattgaggcggttcaactaatcaataataatgatagttttgaggttgaccatattataccaatttctgtaagttttgatgattctcaaaataataaagtattggtacacagccaatgtaatcaggcaaaaggaaagcaaacaccacttggctggctaaataatggcgggggttttggacaaaataaaactgaatatgttgctaaggtgaaaacaaataagaattattcaaaaaataagatggataatttattgaatgatatggatcttagtgacattgttacacagcgtggttttatccagcgaaatcttaacgatacgcgatatgcctcacgtattgtacttgatgagttttattctttttttaaatcaaataatttatcaacaaaggttaaaatagttcgtgggaaatggacatcacagatgcgtaagaagtggaacggagtaggtgggctgaagaaaactcgtgatacatatcatcatcacgcgattgatgctagtattatcgccagtttcccattattgaaagtatttgataaggctataaaattaattgacattgatagagaaacaggagaaattctgcaagataaagaagcaattaaaatgtcacaggaagctaagttactagagaaaataccggtcattcaaaatgagaaatttgaagagctcattaatgaactttatgattttccactctttaaacaggtagaattagcaaatgatattactaatccagaaaaccctgtaaaattcagtcatcatgttgacaaaaaagctaatcgttcagttgcaaatcagacaatttatggtacaagaattaaagaaaaggaaataaataaacgcggaaaagtagaaaaagtgcaagaaagatatattttaggcacaattaagaatatatatgatattgatagctttacaagttttaaaaaaatatacgataaaatgagtaaaacaggtgatgtcaagtttttaatgcagaaaaaagatccgaaaacatggggaaaattagttgaaatacttaattcttatcctgattcggaagaaattacacaagtagacggaaaagtcaaaagagttaaggtttcacctttcgagctttatcgccgagaaaatgattttatcacaaaatatgccaagcataatgatgggcctaaaatagtgagtataaagtactatgattcgaagattggaagccatattgatattacacctataaatgcaaaaaataaggttgttttacaaagcttaaaaccatggagaacagatgtctattttaattcagaaactcggcaatatgaattacttggtttaaaatattcagatctaaaattcacaaacggtgtttatgggattactagcgaagcatatgagaagttaaaacatggtataagcgaagatggtacaaaaacatggaaaccaattggtaaaaatagcggatttagattcagtttgtatcgaaacaatcgagtaaagattgttgatgaaaaaggtgaatcacttgaattattgtttgcctctaggacgacaagtaacgaaggatatgttgaactgaaaccaatttataagtctaaatttgatagtaaagaagatgttggtttttatggtcaaatgactccaagcggtcagtttgtcaagaaaatggccagagttggatataaactctacaaagtaaatacagatgttttaggaaatccatattacattacaaaagagtcagatgatccagagttaagtttatataaaaagtaa

SEQ ID NO: 328 - DNA, 4074 bp, Lactobacillus mindensis DSM 14500
atgaacgatcgaaataaaaaatacaatattggattggacatcggtacaggttccgtcggatgggccgttactgataataattacaatttattacacgcaaaaaagaagaacctttggggaatacggctcttcgatggtgcagagacagctgctagtcgtcgaacttttcgatctactagacgtcgttatcgcagaagacgtaatcggatcaattggttgaatgaaatctttgcagatgaattggctaaaaaagatcaatcatttttagttcggatgaattcctcatgggtctccaaaaaggataagataagacaacgtgatcaatataatttatttatggattccgattatacagatgtggaatatcatcgtgaatttccaactatttttcatctaagaaaacgattaattgaagataaatctcaagccgacatcagattggtttatttggccttacataatatcatcaaatatcgtggtaatttcacttacgagcatcaaaatttcgacgtttcacacatggattccggtctagctttactactaaatcaattgaatcagcaattacaagcatttgaagtcgcatttcctgacgaaaccaacttcgaatcaatgagtacgattcttttagaaaaaaagactcctacccaaaaaatcgatgagatagtcgaccagattcaacctgaaaaagacctacttcagataactaaaaatattatgaaaatgttgcttggtaataaagctgatttggtcaaaatattctcactcgacagtgacgataaaatcactgttgaattctcatccaactccatcgagcaagacctatcaaacttagaagaaaccttgtcagatgaacaatttaacataataacgctcgcaaactctatttatagttcaattgtccttaatgacattttgtccggtgaaacttatcttagtttcgctaaagctagacaatattctgatcataaaaaagatttagccaaattaaagactatgtggcgtgaatcaccagatagaaaagccgttggtaaagctaaaaaagcttacgatgactatctacattctggaaagtatggaatcgaagatttttacaaagatatgagtaaatttttagagactgccactcccgttgaacttgccaaagaggcaaatgaaaaaattctcaacaagagctatctattaaagcaacgcaacaatgaaaacggcgttataccattccaactcaataaaaacgaaatgattgagatcatcaataaccaagctaaatactacccatttttggccgagaataaggataaattactttctatcctcagttttagaatcccttactatgtcggacctctgcaatcgaaaaaagacaatccgttcgcctggatggagaagaaatctcaaggaaaaattcgtccttggaacttcgatgaaattgttgaccgtgaagcatcatcaaataactttattaggcgaatgactagtaccgatacttacttaattggtgaaccagttttacctctaaagagtcctatttaccaaaaatatgaagttcttaatgaattaagcaatgttcgtatcaatgccgatgaagtggataatccacttggtgacaagttatcagtcgacttaaaacaagccatctataacgaattattcctcaaacatcgtagtgtttcaaaagcacttctaactaagtggttgatcaatcaaagttatttccaaaatccccaaataagtggtctggcagattctaaaaaattcaattcaggattaactacttatcacgatttcaagaaaatttttggtgaagatttcgtcaatgatccaactaaccaatcacaactagaacaattagcagaatggctaactatttttgaagataaaaagattctaaaaataaaattggacgattctcaattcaattgcacacctgaacaaattaaaaaaattgctggaatgcgttatcaaggttggggacgtctttcaaagaaactactctgtgatattaagacaactactgtcacaagtaaaaaccatcaacaagctagttactcgattcttgatttaatgtggaataccaatcgcaactttatcagtgtcttaaaaaatgatacttataaattcgaagacaagattcaaacttttaatctcgataaaaacgaagccgctactcctcaagcaatgattgacgagttacagacatcccctgctctcaaacgtggtatccgccaatctgtaaccatcattcaagaactagttaaattcatgggacatgctccagaacatatcttcctagagttcactcgtgaagatgacgttagttctttaaccaaatccagagacagccgtctcaataaactttatgcacgcatcgccaagaatactaaaaaaacagacgatgagctgaagaagtccttgttgccttctagtgatattaaagctaccctcaaggctaacaagaataacctatccaacgaccgtttgatgttgtactacctacagatgggaaagagtttgtattccaatcaaccattggatattaacaggttatctgaatatcaaatcgatcatattttgccacaatcatatatcaaggataattctctagaaaatcgtgctttagtattagcttctgaaaatcaacacaagtctagtgatttattattaaagccagaaattattaatcaaaatattgctcgttggcgttacatgaaagatgctggcttaatgggtcctaagaaatttaagaatctcacacgaattcaaattactgacagtgatcaaaacaatttcatcaatcgtcagttagttcaaacatcacagatcatcaagcatgtctctaatattcttgattcaatgtatggcgaccaaggcactcaatgtgttgaaaccagagcacatctctctacagagttcagaaaagccttcagcaacgaagatgataactatcacttccaacacccagagttcgttaaaaatcgtaatatcaacgattatcaccatgctcaggatgcctacctagcctgcttacttggtttataccaaatgaagaaatatccaaccgataacatgattctgttgaagaaagaatataagagattcttcagcaatactaagaagatctatgacaagaaacatcattttcctgattacgttaaaaatggttggattatcggttcaatgttcaacggagagaagtatgttgacgaggaaactggtcaaattatttgggatcaacaaacaaaagatatggtcagctgtattttccaatacaaacaatataacgtcactaaacgtaccgaagctgctaatggtgaattttacaatcaaactgtctacaagaaggaccctaatgaaaaacgtaagctaatttcgcttaaacaaggtctggatactaaattatatggtggatattctggtgacaatcctgcctacattgttttagtaaaaatcgatgataagaaaaataaactagttaaaatgcctattcgtttggctgaacaagttgataataagacaattgatctacaaacttggctagaagaaaatgttccacacaaaaaaggcatccaagtcctcaaaactaagatacctttgggtcaagtcatttatagtaagaagaatggttatctagcactcaaatctgatactgaaattgttaatgctcaacaactagttctaccttatggttatgttgcgcttctgactttgttacagaaaatgcccgaaaacaaatatgatgaagtactagcttgttatgacgatggcattttggataatatcttcgttgctatcattgataaaatgaaacacttctatccttactactctggcgagcttaaaacattatcggataatatcgataacttcaaagaatctccggatgttaacaagattaagacattacaacaattgttgttactgttacacgcaagttcaacaactgcatctattgaatttaacaatgttaagaaaaattcattaggaagaaaaccaaatagtataaatattcaaaatactgatttactaagcttttccgccactggtttatatgaatcaagaattcacatagactaa

SEQ ID NO: 329 - DNA, 4149 bp, Lactobacillus mucosae DSM 13345
ttggatattggtacaaattcaatcggttggaccgcaattgatgatcatttttcattgttgcgcgttaaaggtaaaaatgcaatcggcgtccggacttttaaagagggggaaacggcagcagatcggcgcggctttcgaacggcccggcgccgcttaagtcgacgtcgctggcgccttcagtttttggatgaattttttgcgccatatttagcagaagtagatcctaattttttggcaagactcaagcaatctgatatctcggcaaaagatcctgctaaaaatcaagaatatatggggaaattgctgtttccggatcaggaagctgcatcagatggaaatggatatcctacgctgattcaaatgcgcaaagcaatgccagctgaaaaggcagcagattttccagtctttaacatttaccagctgcggtatgcactgatgaatgaaaagcgtaagtttgatctacgtgaaatatatcttgctgttcaccatatcgttaagtaccgcgggaattttttaaataatacaagcgttgacaagtttaaagccgatcaaattgatttcaataaatcgtttgagacgctaaatgacttattccgtcaagtacagccgatcgccccatttcaaattgacttgaccaaggtagacgaattgggaaagcttttattggataccaagcaaaagaagcttgatcgtcaaaaggctgttgccaaactattgccattgattgaagatgggactgataaggagatcgttaaagctcatcagcaaacggctcgtgaaatcagtaaattaatcctgggatacaaggcaaaggtcggtttgatcctgcaaaacaatcttgaccagacgctggatatgagtacggaaaacagtgatgatcagttgatgcagattgccgaagaactggatgactaccagatggagctgattaatcaactgtcattgctgtattctcagatcatgctcaatgaaatcgtacccaatggcgaaaccgtttcggcatcaatgctgaaccgttactacaagcatcgctgtcagttaaaagaattaaaagattatggtgctgcccaagataaaaaaactcgtgagcagctcgatcatctttatgctgaatatattggccagattcctaaagacagcaaatttgactttaccaaagatttgaaaaaattgatggacaagtctgacctgggacaaaagattaaagacgagattgaggctggcgactacctgccgaaacagcggacatctgcaaacggtgtaattccgcaccaaatgcatcaacaagagcttgatcaaataattgaaaatcaaaaagaatattatccttggctggcagaaccaaatccagttgaaaagaacattaagaatgccaaatataagctggatcagttagtcagcttccgtgttccatattatgtcggaccaatgatcactttggctgatcaacaaaagacgtctaaggcctcttttgcatgggcagtcagaaaaaaagctggcaagattacgccatggaatttttacgatatgattgatcgtgagaaatcggccaataattttatcaaacggatgacgaataaggacacttatttgttaagcgaggacgttttgccggcatcaagcttactgtaccaaaaatttacggttttaaatgagctgaataatattcgcgtgaatggtcgcaaactacagccagcactaaagcaagctatctatacggacctgtttcagaagcgtaagacggttaatcttaagactttgacgaatttcttggcgattcacgaaccaacgctgactaagccaaaaatcgaaggactgtcgaatggtcgcagctttaattcaagtcttggtacctatattgatatgtctaagatacttggagacagtcttgatgatttaaactatcgtgatgatattgaaaagattatcgaatggtcaaccgtatttgaggatagtgagatttacggcgtcaaactgcaggaaatccagtggctgaccaacgaacaaagagaaaaattggttcggaaacgttatcagggatgggggagactctccaagaaactgttaacggggatcactgatgaaaatggtcagcgcattattgatctaatgtgggataccagcaaaaactttatgcagatcgtgcatcaaccagtctttgaagaacaaattgctgaacttaatcagcagctgttgcaagacgctgacaaggcaccattggaagttgttgacgatattttggctgacgcgtatacatcgccccaaaataaaaaggcaattcgccaggttgtcaaagtcgttgctgatgttgtcaaggctgttggcaatgccccagcatcgatttcaattgagtttgctcgtaatgaggatcgcaacaaggaattgaaaaacagtcgacggcacagcattgaaaagctttatcatgaaacggccgaaaaactggtcaagcaaaccaatctgcttgaagaattgggaaacgtcaaggatttgaatgatcgctattatctttactttacccaggctggtcgtgatatgtatgatggcacgccaatcaatatcgatgaaatcagcacgcattacgagattgatcacattttgccacaatcattcttgaaggataattctttggataatcgggtcttggttaagaaatctgaaaacgcggctaagtcggatcgagtaccggcaaagctttatggagctaaaatgcgggccttttggaagcaacttaaagaaagccagctgatcagcaatcgcaagtatcttaatctgacgaccgatccagaacaggttgacaagtatcagatgcagggatttgttcatcggcagttggtagagacgcgccaaatcatcaagctggcagccaatatttttggttcgctttatccagacagcgccgtgattgaaacgcgggccgagcttaccaagcaattgcgtgaaaagttcagcctttataaagtacgtgacgtaaatgactatcaccacgctgttgatgcttacttgacggcgtttgctggccactatctgtatcaacgctatccaaagctgcggccgatgtttgtctacggtgactatgccaaaatttatgctgatgatttgaaacggttgcgctcggttaatctttttcatgacttggaaaaagatcaatacaatagtggaaccgcggtaaatccagaaactaaggaaaaaatcgtggatgtcgactggctgagcgattatgtatccaagattcagcatttcaaatatatgctgatttctaaagccgtttatactcagcacgggcaactttatggggcaacgattcttccagttgcgcaggttgataaaatctcagcaccaattggcattaaggacgataaaccggtcgatatctacggtgcttataccaatgaggttgctgcttatatggcaatcgttcgcgttaacggcaaaaagcctaagtataaggttgttagcgtaccggtcagaatgctgcagcgactgaagatggctgaacaaaaaggtcatgatcagtatatgcagaccctgcacgatgttttattgcgaaacttcacttcgcttaaaaagaaccgtaaaaccggattaaaagaagccgtggtaaaagactttgacgtgctggttccttgtgttcgctataatcagttagtcattgacggggataccaaatttacactggggagtgctacttatcagcataatgccaagcagctggtattatgcaatcattcattagaaacgttagctaataattttgaatacgtcagaaaacatcctgatgaagctgatgaacggatgataatgctttatgatgatattcttgaccaggtcaaccactactttacgctgtatgataaaaataaattccgtgaaaaattaaatgcaggccgagataaatatctgaagctgccaaccttttcacagtttgaaaacaacaagaagacggcaattggcaaatccgaggctataatcaacatattgagaggactgcatgccaatgcggctataacgaacttaaagtgtttgggcgtgtcaaccccatttgggcaattacagtcgccatctggtattgaattatcagaaaatgcaaaattagtatatcaatcaccaacgggcttatttagcagagaagttttgttgaaagatctgtag

SEQ ID NO: 330 - DNA, 4131 bp, Lactobacillus namurensis DSM 19117
atggataagaagtatggcattgggttagacatcggaacaagctcgattggttggaccgtagttgataaatacggccatatcatccgggttaagggccaaactgggattggtgtgcgtttattccgtgaaggacaaacggcggccgagcggcggacttttcggacaacccgtcggcggctaagtcggcgacggtggcggttgagattgttacgggaaatttttgatgaaccgatttctgctattgatgagaatttttttgctcggcagaaggcttctagcttagctcctggagatgctcgttatcagcaagcgtttcagctttttaacgaccgaacagaccaggcattttattgcaagtatccgacaatctatcatttgcgtcaggcgttaatgacggagtcacgacagtttgatatacgagagatttacctagctcttcatcagattattaaatatcggggccatttcctgttggggggagcggccaaggactttcaatcagataaactggacttagaggcctattttacgacgattaatgctcagttggcggggatttactcggatggctctgttcaattgcctaccttggattggaatcaggcttgccaagaactgacggacaccagtcgaacgcaaagtgaccgaaaaaattggctagttaaagagctgaaaagttacggagattctcagttaaagccaatttacacgcaaattgctaatgctattttaggattcaaaacggatcttgctaaaattatgggaattaatgatccggagaaagccttatcatttaatctggatgccttggatgaccatcgagacgatgtggcggaacttttaacggatgagcaaattccactggtgaacctgttggcgaaattacatacagcattggaactagccgctattttaccggatggtcaaactttgtcaggcaaaatggtggaaatctatgaaacgcaccgaaaacaattgaagacgtacaaggcgtttattcggcaactaccagatcgacagcagcggttagcgttaaagcaggcttatgaccattatattgatcaagggttgaatcgagaggccttttacagtgaagttaaggccattcttgagaaacagaaaccgttgacagcgacaggacaagcaatgaaaaaagctatggatcagaatgcctttctgttgaaacagcgaaccaagaccaatattgcgattccttatcaggttcagcaacaggaaatggaccagattattgcgaatcagtctaagtattacccttggctggcaacgcctaatccggttaaaagccggcgcgtgattgccccctataaacttgatgaactggtttgttttagagtgaattattatgtggggcctttggttcagtccaaacccggtgaagcgaccaaagaagctaagtttgcgtggatgacgcgtaaggaccctcaatcaacagtagcaattaccccctggaatttcgatcaacaggtggatcgtcaggcttccgctaatgcgtttattcaacggatgaaaacgacggatacttacctgctgggagaagatgtgattccaaaaaatagcttgttgtatcagaagtatgaagtacttaatgagttgaacaatgttcgggttaatggagattggttggatcctcaacgaaagcagtatctgttcaaaaagttattcatggatcaacctcagtcggttgtcaccgtcaaggcactacagaagactttggtggtaattggggcatgtcctactttgccaactgtggaaggattggctaatcctaagcgcttcttgagccagttaaccacgtatcatgacttttgcaaactgttaccggatgacatccagcgtgcagatcgacaagctgatattgaaaagattatcaactggtcgacaattttcgaagatacagctatctttaaggaaaagttacgggacattaaatggttgtcagctgaccaaattcgtcggttaagtagtcgaccacggtatcgcggttgggggcggttctcagctaaattgttatgtggcttgcatgatcgccaggggaatacggtaatggacgaactgtggcagacgagtcgtaattttatgcaaattattcgccaatccgattttcagacggcaattgctgcggtgaaccagcaagatttgggacggcaagacctgcaacgggtgattgacgacctctacacgtcgccacaaaataaaaaggccattcgccaggtgctggcagtggtgacggatattcaaaaagccatgcacgggaaggcgcctagctggttatttgtagaagtggctaaaggtgcacaaaagaacccacaacgaacgcaatcgcggcaatctaagttggcggaggcttatcgagaaagtgcgcgtgaactcgttgatgaggccgtgaaagaacaattgttaactctgccagatgatcggcagacgttttctgatcgactagttttatatttccagcaaaacggtcgtgatatttacacgggtgagcctttggactttgaacgcctgagtaactatcacattgaccatattattccccaggcggtcgtcaaggacgactcactggataaccgagtactaacgtcgaatcaagctaatttggaaaaaggagcgcatgtgccgaccatatttcgggataagcaagaaccggtctggcaggagctgtaccgggtggggttaatatcacaccgcaagttgcgcaacctcttaactactcccgatgacttggacgaccgggggcgggcaaccgggtttattgcccggcaactcgttgagacccggcaggttatcaagttagttatggaagttctgagtcagtactacgatacaaccgaaaccgagctaatttcaattaaggcggggttatcgcaccaatttcgccaggaactgaatctccctaagttacgggcactaaacgattaccaccatgctcaggatgcctacttagcagcgagaattgggacgtatttgctacaacgctacccgaacttgaaacgctttttcgtctatggggactttaaaaagacgcactttgacttgcaacgacgctttaactttattggtggcatgatttccagggaaaagcagccctataatcttattaaaaatcccgtcacccaccaggttatttgggatgaagaaatggagattggtgattgccagaagaagaatccagagcaaccgaaacatgacgctactgtgaagatgatgaacttaactaaaattatgaatttgaaacatattttggtgacccacgaagtgtacgagaatcatggtgcattgtttaatcaaaccatttatcccgccagccaagcacataaaaagaagcttattccgcagaagaccgagaaacccattgaactttatggcggtcatagtagtgaacaagcaggatacatggcgattattcggctacttgggaaacgcccaggttataaagttatgcgggttcctgttcgttatgtcagtcaattacagcatcaggatgtagcagagcagaaaaagttactctataaaattttcgtttcggaattaactagtcgaaacaaggttaagccgtttgaggtcgttgtaccacacgtttgtttaaatcaaccagttgaggatatgatcaaggggcagtggcaccgctttgctttaagaaccaatgggtattatcagaatcaacagcagttaattctgtccttggttgctcagcggactttggcgggatataaaccaaaggatgatgagttgatggcggtttatcatgaaatctgtaaacaggtcaaatactacttcccactctataaaatgaataaatttcagtcacggctatttgcggccgaggagctcttgcaaaagcgttctacagtgaatagctttagtataacaatagggaaaaatgggaaagagaataaaacactaaacttaggtaaacgtgagctcctgttgaggctgttaggtgggttgcacgccaatgcaacccgagtcgacttgaaagatattggttgtacaggtcaatttgggcaacttcaagtgaagaatggaattaagttaactgaacaggcagtccttatccatgagtcaccaacgggactatttcatcgacgggttcgtttgaacgacctttag

SEQ ID NO: 331 - DNA, 1167 bp, Lactobacillus nantensis DSM 16982
ttttacttcaaaattcgattatcagaggttgtaattatggcagatagaatcagtttaggtttagatattggtgttgcgtcggttggttttagtgtattgaatattgatcaaggcaaggttgttgaactaggtgctagattgtttaatgccaaggtggctgaaggtaatcaggatcgtcgttctatgcgtggttctagaaggttattgaaccgaaagaaacaacgccgtcaagatacggctaaattgtttgaagaatttggtttgattagtaattatgataaagataacttttcagaattttttgataacaatgagaatccctatgaattacgggttaaagggttgaccgagaagctaactaaaaatgaattggctgaaagtttatatcaaattgttaaacgtcgtgggattagttatgacttgaaagatgctgattttgaggatggcgggactgactactctagtagtttaagtttgaataataaagctttggaagataaaacaccagccgaaattcaattacaacggttaaatgagtttggagctgtgcgtggaaaagttgttgttggggatgatttagataatcagaaagtattgttgaatgttttcccaactaaggaatataaaaaagaagctcaaagaattattgctacgcaaagggaattttatccagatattttaacggatgaatttgaaaagcaatattgttcgattctaacgcgtaaacgtgattactttgttggaccgggtaatgaaaagtctcggactgattatggtatttataagacagaaggtcggacactggataatttgtttgaagagttaattggtcatgataaggtttatccagatgaattacgagcttctgcagcttcttacacagcacaattattcaatgtcttgaatgacttaaacaacttgagaattttgagttacgaagatgagaagttaactcaggccgacaaagaaacgattattaacgaattaaagagtaatgtgacaacggttaacatgatgaatttaattaaaaaggtcagcggttgtgaaaaagatgatatcaaaggatatcgaaccaacgataaagataagccagagattagttcaatggcaatttatcgaaagactcataaggaattcttgaaggctgacgttgatattactcagtga

SEQ ID NO: 332 - DNA, 3399 bp, Lactobacillus nodensis DSM 19682A
agaaatttggaaaacaaaattagcttaggattagatattggagttgcttctgttggttttagtgtaattgatgcacaagaaggtaaagtactggagttaggggccagactattcaatagttcagtttccgcggagaatcaaactcgtcgagatatgcgagggtccagaagactaagtaatcgcaagaaacaacgtcgtaaagatgtagctcaactatttaagacttttggattaataaattattttgataaagaaaattattttgataactttcaaaataatttaaattcttatgaattgagagttaaaggattatcagagaaattatcaaaagaagaactggtgaatagtttgtatcatattgtcaaaaggcgtggtatcagttatgacttggcagatgctgacactgatttcgatggttctgattactcatctagtttgaatcagaatcaattggaattacagacgaagactccagctgaaatacaacttactcgcttgaatgtacatggagctgtacgtggaaaagttacgatcaatggcgaggatgaggacactatgcaagtattgttgaatgtgttccccaccaaatcatttgtatctgaagcaaaaaagattattcaaacacaacaacaatattatcctgatattttgacggatatatttgaaactaagtatttagaaattctagaacgtaaaagagaatattttgtcggacctggtagcgaaaaatctagaactgattttggtatctataagaaagatggtagaactttggataatttgttcgaagagttaattggtcatgacaaaatatatcctgatgagttacgtgcgtctggtgcatcttatactgcacaggtttttaatgtcttaaatgatttaaataatttacgtatttctagttatgaaaacgggaaaatttctacggaagataaaataaagattgttgaagatttaagaaacaatatcggcaatgtaattataatgaaaatcattaaaaaggttgccggttgtgaagatgatgatattaaaggctatagattggatagcaaggacaaaccggatattcattcaatggccgtttatcgaaaagttcatcgtgatttattgaaatatgatgtggatattattaagtggccaacggaatttattgatgaattaagtccaatattaactttgaatacggagaacggtgaaattcggaaacaaatggtcaataagttgcaaccaaagtattcatttttaacggatgaacttattcaagttattattaataacaaatctagttttgacgttacttccaataataaatggcatcgtttctcattgaaaacaatgaatgttttgatcgaagaaatgttcagacgaccagttgaacaaatgactcttattcaagaactgggattgattaaagactcaggtaagagatttgaaaattgtaaacttttgccatatagggaaatctcaaaggatatttttaatccggtagcgtccaagtcagttcgtgaggctcttaaaattgttaatgccgtaatgaagaagtatggtcaaattgattatctggttatcgagatgcctcgtgataagaatgaagaagaaatgaagaaacaaattgaaaaattccaaaaggaaaataataagcaaaaagatgaagcaataaatgagtttgttaaaaaaattgggaataagaatgctgttgatgatggactaagacgatatggtggtaaattatatttcaagattagattgtggtatcaacaagatggaattgatttatataatggcaaagtaattgaaccgtttgacttattgaataatattaataaatttgaagtggatcatattattccagaatcaatttcatttgacgacagtattaataacaagacactttgctatgctgatatgaatcaaatcaaaggacaaaagacaccgtttgaatttatgaacgagggacatggccagggctttgcaaaaatgaaggctatggtaaataagaattcaaagttaaaaggtaaacgaaaaaattatttatttgatgaaaatattagtgatattgaaaccagaaaaaggtttatatctcgtaaccttgttgatactcagtattcgtcaagagtggttttgaatagtttgcaagagttctttaaggaaaaagaaaccggaactaaggtgactgtcgtccgaggtaagtttacttctaatttacgcaagcattggcatatcaataagacacgtgatacatttcatcatcacgccatcgatgcatcaataattgccgcgacaccatttttaagaatttggaaaaaagatgccagtttattccccatgcatgtctctgaaaatactgttgatattgaaactggtgagattcttaatgatactgaatttaaaaaagacttttacggattaccgtatagcagttttattgaagaactgaacggtgctgatgaccggattaagttttcgcatcaggttgataggaagatgaatcgtaaggtaagtgatgcgacaatttattcgacacgtaaaggaatgttgaataaagataaagaagaaactgattatgtcttgggaaaaatcaaaaatatttatgatgttagtgagtataacaaattcaaacgaatttacgataaagatccaaataaatttctgttggctcatcatgatccaaaaagctttgatgaacttagaaaaatcatgcaggaatatcctagtaaaattgataaagtaatgactaatggtaaagtaaaatctgtggatatttctccatttgaattgtatcgtcgcaaacatggaatggtacagaaatactctaataaaaataaaggccctgttattaaacaacttaagtatttagacaagaagttgggatctcacattgatattactccgaaggatacattgaatgataggcatgttgtattacagtcactgaagccgtggagaactgatgtgtattacaatagtgtgaccggtgaatatgaaattatgggtattaagtattctgatttgaagttcaatggtggtgagtatggaatcaagatgagcaaatatttggaaataaaagagcgtgaacaggtttcagatgagtctgagtttctgtttactctttataagagagatagaatccaaattataaattgtgaaaatgacgaaattgtagaaatgcttttctggtctagaaataattctaatattgggtatgccgaacttaaaccggtgtataaatataaaactgaggatgaaagttggccggtatacggatatggaaaaaatcaaatcctaaaaagattggtaccaaagaattgtaaaatattgaaagtaaataccgatatactgggcaatccatactatattaaaaaagaatccaaaaacccaaaaaatattcttgattaa

SEQ ID NO: 333 - DNA, 2700 bp, Lactobacillus nodensis DSM 19682B
atgaatagaaaaacgaccaaatttaacattgggttagacattggtaccggctccgttggctgggcagttacagatgataattacaatttattgcatgcaaaaaagaaaaacctttggggagtacgtttatttaatacagctgaaacagcggctgatagacgacttaatcgttctgctagaagacgttatcgcaggcgtcgcaatcgtttgaattggctagatgaaatatttgcggacgaattattccaagctgatcctggatttttgaaccgaatgaaacactcctgggtgtcaaagaaagacacagcaagaactcgcgatgaatacaacttattcatcgataaagaattcaatgacaaaacctactttgacaaatatccaactatctttcatttaagaaaacatctaattgaggatacacaaaaagctgatattagattagtttatttagccatccataatatcctaaaatatcgcggtaacttcacttatgaacatcaaaatttcgatgtttcgaagatgaatgaaggactcgaaaatactctctcaaacttgaataactcattagacctgttcggattaaaattacctgacgatgccgacttcaaaaaaatcagtgaaatactactagaaaaagattggagtcccagcagcaaagtcagcagcatcatcaccttactaaagcctgaaaaggatatgaaacaactatacaagcaaatatttactttattagttggtaacaaagctgacctaacaaaattatttaatatcgattctgctgaaaaaatcactattagtttttcttcaaatacgattgaagctgacctaagtgatgctcaggaaaaactaactgatgaacaatacgccatcgttgaaatggctaatccaatctatagtacgatcgttctcaatgaaatcctcaatggtgaaacttacttaagctttgctcaagtaaccaaatacgaaaatcatcacgaagatctgatgaaattaaaagacttatggagaaacgattctgaccgtaaagcagttaaaaaagctcgccttgcctacgataagtatcttgatgatggtaaatacaatcttgacgatttttataaagatctcaaaaaatatctatctacaaaagaagacccatattctcaaagtgcattagaaaaaatggagaatcaccaatatctcctcaaacaaagaactagtgataatggagttattccattccaacttaacgaaaatgaattagtcaaaataatcgataatcaatcacaatattatccattcctaaaagaaaataaggacaaaatcctatcactgattaacttcagaattccatactacgttggaccacttcaaagtgaagataaaagtgacttcgcctggatggaaagaaaagctaatggcccaattcgtccctggaactttgatgaaaaggttgaccgtgaaaaatcatcaaacaacttcatccgtcgcatgactgctactgatacttacttgattggtgagccagtacttcccaagtacagcttaatttatcaaagatacgaagtgctcagtgaattgaacaatgtccgcatcaagagtactggtgaagaatcagataagggttcacgtctaaacgttgatgttaaacaacgtatctacaacgaactattcaagaagcatactactatttcaacaaaacgtctgacagattggttgagaaaagagagttattattcagcacctgagattcacggactagctgataaaaccaagttcctatctagtctttcatcatatcgtaagctagcaaaaatatttggtaacgacttcgttgacgattcaaagaacctcaagcaactagaagaagttatcgaatggcaaacagtcttcgaagatcgacagattcttaaattaaaattgaaaaactcaaaactttataccgatgatcaaatcaaacaactagcagcaattcgttatcaaggttgggggcgcttctcaaataaactactcacacaattattggttgaaacaaaagtcaatggtgaacacatgccaagtaaccactcaattctcgacttgatgtggcagaccaagagtaacttcatggaaataattagagaagataagtataacttcgaaaaacaaatcaaagactataacgttggtgatgcagccgacaagaagccactagatcttgtcaacgagctaccaggttcaccagctctaaaacgtggtatctggcaagctatcgttatcgttcaggaactatctaagttcatgaaacacgctcctgaacacatctttattgagttcactcgtgaagatcaagatagtggtattaccaaatcaagatacaatcaattagataaaaaatataaaaatattggtgatatggttcgtaacctagcacccaagttgaagaatactctatatcttaaagctcaactgaaagacaaaaaagacgctctatcaaatgagcgactatgttgtacttcctacaaatgggtaaaagcttatacagtgaagccgagattgatatcaaccgtctattcacgacagattatcaagttgatcacatcttgccacagtcatatatcaaggacgattcacttgaaaataaggctttggtcaaagcaagtgaaaaccaaagaaaactcgatgacttactcctaccaaacgatgtcattgccaacaacattcaacgttggcaacaactaa

SEQ ID NO: 334 - DNA, 4074 bp, Lactobacillus oligofermentans DSM 15707
atggctgcgaaaaactataatataggtttggatattgggacgagttcaattggctgggcgatagtggatgataattatcaattaatgcacgcaaagggtaagtatggatatggaacgcggatttatagtgaagggcaaacggcggctgaccggcgtggctttcggacaacccgacggcgcttgaatcgacggaagtggcgtttgcgattactccaggatttctttgaaccatatattttaccgcaagacgaggctttttttattcggcaaaagcaatctaatttagtccctcaagatactaaaaaacagtatccggagagtgtcttatttgatgatacttcagataaagatttttacacagaatatccgacgatttatcatttacgacaggcactaatgacggaaaaccggcaatttgatattcgtgaagtttatctagcaattcaccatatcgttaagtatcgcggtcactttttaaacaatgctcccgtaaaaacttttaaaagtggcaatttagatttagcaattaaatttaatgaactaaatgaagaatttaaaagtgtttatcctgacttagaattacagtttaatcttgatcagattgatgaaatcaaaaaaatactactagatagcactaaatcacgatttgatcgacaaggtgaagcagtgaagttaatttatacggtctcagaagttaaaactattgaaaaattgcaaaataagattgtaaagcaatttttgagtggtattttaggcttgaatactagatttgatgttctgacaaatactgagagtgatgattcaatgtggaaattttcactggattcagaaagctctgatgatgcattagatgagatcattgctcaactcgatgatccggctattcatgtggtggaattggtaaatgagattcattcttcaatcactttggctgggattgttcctgaaggccaaggcttatctgaatcaatggttgaaaaatacgaagcacataaagcacacttacaattgttgaaagccgttgaaaagttagttgataaaaaggctgcggataaattggaagtagcctatgaccaatatatcaatggtaaagacagcaagcagttcattaaagaagatttttataaagcagtccaaagtgaaattaaaggggtggccggggatgaagttgccgagattaatcagttaattgagctggaccaattcatgcctaaacaacggacgaaggaaaatggtgccattccgcatcaattacatcaacatgaattagatgtaattatcgaaaatcaatcgaaatattatgattggttaggcgaaaaagttggaaatgaatataagcttgataagttagtttcattccgggttccatactacgttggaccattggttgatactgcaagtaaagagaaaaaagatgagactagatttgcttggatggttcgtaaaaatccagaatcgactgaagcaatcaccccatggaattttgaagatatcgtggataagaatgcatcggctgaaaactttattaagcgcatgacgaccaaggataaatatctacttaatgaagatgttttgcctaagtgtagtttattaacacaggattttgaagtttataacgaactaaacaatattagagttaatggagaaaaatttactgccgaacaaaagcaattaattcatgatgaactatttacgaagcatgcaagtgtgtctattaaacaattgaaagattttctggttagtgagttaatgtatgtccgtgataatttaaaagtcgaaggtttggctgatgaaaagaaattaatgagtagtttatcaactcaatttgactatcaaaaaattattccagatcaaattaatgacgtgaagtatcgcgaagatatcgaacaaatcattgaatggtcaaccatttttgaagatgcggctatttttaaaactaaattaaaagaaattgattggctaactgatgaacaaaggaacaaattagctaacaaacggtatcgtggttggggtagtttatcgaaacggttattggcatgcttggttgatgaaaatggtcaacggattatcgatattttacgtgatagtagcgataattttatgatgattgttaatcgtcctgagtttaaacaagcaatttttgatgaaaatgctaatttaactgagaccaatagtaaaaaagatatgtttgaaatgattgataatttttatacgtcacctcaaaataaaaaagcaattcgccaagtattattagtagttcaagatattcaaaatgcaatgggtggcgtggcaccacaaaagatatttattgaatttgctcgtgaagatgaagtgaatggtcgtcggactaattctcgctatagccaaatccgtgaaatgtatagtaaggtcacagatgatgttataaataaaacagttcgtggtgaattagaagccaataagggttctcttaataaagaaaagctattcttgtatttccttcaaggtggaattgatttatatagtggaaaaacaattaatattgataatatttcgagttatgatgttgaccatgttttgccacaatcatttattaaagatgattcaattaataataaagttttggttaatgctaaaggtaatcgagttaaaaatgacaacgttccgatggaattatttggtgccaaaatgtacccaacttggaaacgaatggttgacactgggataatgtcaaaagctaagtttaaaaatttgaccttgaaccctgataatgttgataaatttaaggcagagggctttattaatcgtcaattagttgaaactcgccagattattaaattagttgcccaaattttaaatgataaattgggtgatgatactaaaattgtgtcggttaaagctaatttgacccatgatatgcgggtattctttgattttcctaaaaatcgaaatgttaataactatcatcatgcgtttgatgcttatttatcagcgtttgttggtacttatttatataagcgttatccgaaattacaaccatattttgtctatggtgaatttaaaaaaatggataaacttaaaaacatgactagttttgatttcttacgagatttaaaacacaccgataaagttgtcgataaagataccggtgaaataatcgctgataaattagcagtaattaccaatatgaataaaatttatgacttcaaaaaagtattggtgacacatgaagtacatgaaaatagtggtgcgatgtatgatcaaaccctttatcccgctaaactagataagtcacttggtcgaaaaggcgctaaacaactaattccgaaaaaagatgatatgccaactgcattgtatggtggctataccggctcaaaagatgcctttatgtcgatcgttcgtttgaaaaagaaggatgaagtttattataaagttatcggaatccctgttcggattgccgattcagttcaacatggcaaagaagttgatgttgaagcactaacacagtttattgaaactaaatttaccaaagaaaatttaaataaaaaaactggtgaaattactcgtaaagttgagtggtttgagttggtattgcctaaagtgctatttggacaggcggtatttgatggtgggcagccatttatgctgggatcatcaacatacccacataatttaagagagctagtcttaactaaagatagtgttaaaaaaattgcaggtaaagaatcaaataagtcgtacttagatgcttatgatgaaattatggaggccatgaataagtattttccactttatgatactaataaatttagagaaaaggttattgaaggaagatctaagtttattgatttacctgataaagatgagtacgaaaacaacaaattagtacaagtaggtaagtctactattattgatcgcatgtttattggtttgcatgcaaatgctgcaagaactgatttgaaaaatattggaataactacaccatttgggtttatgcaacaagcaagtggtattaaattaaccaaagatacagttgttttgttccaatcttcaactgggttatttgaaaggaaggttgccctaaaggatttatag

SEQ ID NO: 335 - DNA, 4188 bp, Lactobacillus otakiensis DSM 19908
atggttattagttcatgcataataggtgatgtgcctaaaggggttactgggcaacattattttgaggagttttatcgtatgaaagttaataattatcacataggtctcgatatcgggacatcatcaattggttgggtcgcaatgggggaagacggcaagcctttacgcgttaaggggaagacggcaattggtgctcgattattccaagaaggcaacccggctgctgatcggcggatgttcagaacaactcgtcgccgtttgaacagacgaaagtggcggttgaaattattggatgaaatatttgatccatatattacacctgtggacagcaccttctttgcccgtttaaaacaatccaatctgtcgcccaaagattcacgtaaggaattcaagggctcaatgctgttcccggatttaactgacaaacagtaccacctagattacccaaccatttatcacttacgtcatgcgctcatgactcaggataaacagttcgatattcggatggtgtatttggcaattcatcacattgtcaagtatcgtggaaatttcttaaattcaacaccggtggattccttcaaggcatcgaaagtgaattttgatgatcaatttaaaaagttaaatgaattatatacagcaatcaatcctgaagaatctttccaaattaatctcgcaaatagtgaaaagatcggccaacaattccttgacccatccattcgtaagtttgataagaaaaagcaaattccaaaaattgtcccggttacaatggacgataaagccgtggacaaacttaacggcaagattgcttcagaaatcatcaatgctattttaggatataaatccaagctggatgtggctgtgcagtgtgacccagaagattcaaatccctgggcagtgaaatttgatgatgaagatattgatgccaaactgcagaaaattttacctgaaatggatgaaaatcagcaatcgatcattgggatcattcaagacttgtattctcaagtaaccttaaaccaaattgtcccaaatggaatgtcattatcagaatcaatgattaaaaagtacaacgaccaccatgatcacttgaagttatacaaaaagttgattggtcagatttcagattccaagaagaaaacagcattgaagaaggcatacgatcaatatgttggcaacgatggtaaagtcatcgaacaagatgacttctattcgagtgtgaaaaagaatttggatgattcagagttatcaaaacaaatcatggatctgattgacgctgacaaattcatgccaaagcaacggacatctcaaaatggtgtcattcctcatcaactccaccaaagagaattggatgaaatcatcgaacaccaaagtaaatattatccttggctggcagaatctaaccctaacaagcatgatctgcacctggcaaaatacaaaatcgaagaactggtcgcctttagaatcccatactatgtcggtccaatgattactcctgaggatcagaaaaagtctggggccgcagtcttttcttggatgaaacgcaaggaaccaggtcaaattacgccttggaactttgatgagaaagttgatcgaatggaatctgctaacaaattcatcaagcggatgaccacaaaggacacttatttgattggtgaagatgttcttccagatgaaagtctgctgtatgaaaagttcaaagtgcttaatgagttgaacatggtccgggtgaatggcgattcgctgaaggttgccgacaaacaggcgatttatcaagacctgtttgaaaactataagcacatttccgtcaagaaactgcaaaactatatcaagggtaaaaccggattgccaaacaatcccgaaatttcgggattatccgatcccgatcagttcaataattcgctcggaacatacaacgacttcaaaaagttgttcggcgataaagttgacgatccggatcttcaaaatgattttgaaaagatcgttgaatggtcaactgtcttcgaagacaagaagattttacgagccaaactcaatgaaattacctggttgaccgataagcaaaaggatgatcttgagtccagtcgttatcaaggctggggacgactttccaagaagctcctgaccggaattgtgaacgatcagggtgaacgaattattgacgagctttggaataccaacaagaacttcatgcagattcaatccgatgacgattttgccaaacgaattcatgaagccaatgctgatcagatgaagtctaccaacatggaagatgttttggcagatgcctacacgtctccgcaaaacaagaaggccattcgtcaagtcgttaaagtggtcgatgatattcaaaaagcaatgggtggtgttgcacctaagttcatctcaattgaatttacccgttcagaagaccggaacccgcggcggacaatttctcgccagcgacaactggagaacaccttaaaggacacggcgaaatcgctggtaaagtccatgaatccaaacattttgtccgagttggataatgcgtcgaggtctaagaagggtctgactgatcgtctgtacctgtactttactcaacttgggaaggatatgtatacaggtgagccaattaatatcgatgaaattagtaattatgatattgatcatatcttgccgcaggcgttcattaaggatgactcgttgagcaaccgcgttcttgtatcaaaggcagtcaacaatggcaagtctgctaatgttccattgaaactgttcggtgccaagatgggccacttctggaaacagcttgctgaagcgggcttgattaataaacataaactaaagaatcttcaaacaaatcctgacactattagtaagttcgcgatgcacggtttcatcagaagacaattggtggaaaccagccaggtaatcaagctggttgcgaatattctcggtgacaaatatcgaaatgatgataccaagattatcgaaattacagctcggatgaaccatcagatgcgagatgagttcggctttatcaaaaaccgtgaaatcaatgattaccatcatgcctttgatgcttatctgaccgcattcttagggagatatttgtaccaccgttatatcaagttgcgtccatacttcgtttatggcgacttcaagaagttcagagaagataaggttaccatgcgtaacttcaacttcctgcatgatttgacggatgatactcaagcaagaattgcagataccgagaccggtgaagtgatttgggatcgggagacttcgattaagcagttgagagatgtttatcattataagtttatgttgatttcgcaagaggtttatacacttcgcggggcaatgtttaaccaaacaatttatccagcatcccaggcaggacggaaaaagttaattccaatgaaagccgataagccagttgacgtatatggcggatatagtggcagtacggatgcatatatggcgattgtccggattcatgataagaagggtgataagtataaggttgtcggcgtgccaatgcgggcgctaaatcggctgaacactgccaaaaatgtgagtgatgccaaatatgaccaagagttgaaagaagtcttgacgccacaatttaccaagtccaagaaaaaccggaaaactggagagatcactcaaacagttgaagactttgaagttgtcttaggtaaagtgatgtaccgccagcttgtgattgatggcgataagaagttcatgcttggaagttcaacttatcaatataacgcgaagcagctggttctttctgatgaatccattaagacccttgcaagcgaaggaaaactgaatgaggcgcaagagagcgctgcgtatgataaggtttatgatgagatcttggataaggttaataaatactttgcgttgtatgataccaacaagttccgtcagaaactaagcctgggtaaggacaagtttgtgggacttcccaatcataacgtgtttgatggaagtaagaagatatcctcaggcaagcgagagattctaaacgaaattttgaacgggttacacgcaaatgccacactgggtactttgagcgatattggcttttcaacaccatttggcaagatgcaacagcctaggggaattggtctgtcttcaaatacaagcattgaatacgagtcatttactggactgtttaagcgaacaatatttttaaaagatctataa

SEQ ID NO: 336 - DNA, 3237 bp, Lactobacillus ozensis DSM 23829
atgcataaacattataaatatgcgttaggtttagatgttggagttggttcagttggttatgctctacttaaactagatgaagctgatcaaccttgtggattgcttaaggctaattcagtgacttttccaatgtcccaagaccgcacaggcaatactttggcatccattgctcgtaattatcgaagtggtcgacgtttaaaccgtcgtcgtaaattaagaaaacagttagttagtaatttattcactaaaaatggattaataaatcgtaatgatgtatatagtccttatactaagcatcccaattttgatttatatcggatttggcatgatagttttaatcagcaaatatccaatcaagatttatatcgcctactatattattttgccggtcatcgtgctttcaagtctaatcgaatccatcaactaaaaagttctggtgataaagatacgactaagctacttagttctattgacaccaataaagaatattttaacaatagtcaatataaccatttaggtgaaatgttttactgtgaccctaaatttgctcaacgtaaacacaataagggctatgatgatggatatttattcaatattgatcgtggtacgttgttaagtgaaattaaagagatattaaatgctcaatcaaaatttggaaatcctgctatcaatgatgatttcaaagctcgatacttaaaaattttgagtcaacaacgtaattttgatgttggccctagtaatccatctagatttgctttagttgacagttcaggaaatattaaattaaggaacaaaaaagataaattaaatttatcattcaaaactagtgctaaagccagttatacttttcaaaaatttcagattttacaaaagttagctaacacccgttataagttaaattcacaatccaaatatcaatctctcaatgctgaaaccattgataagatttttaataaagctataacgaaagctaactataaatatagtcaacttaaaaaagatttgaaattaccagattcagctcgctttaatatggttatgtatgaaactagcgatgataaatctgctaaacaagctgagactaaaacgtttattataaaagataatacctactacatattatccaagatattgtcagataaattgcagcatgattatacggtaattgatcaaatagcagaaatacttactaggtataccagtgatgaacctaaagcaaaggctttaaagagacaattaggtgaaaaactatctgatgaaaaaatagaatctttattggctctaaactttactcaatatggtagctattcaatcgataccatgcagtgcttaattccctatttagccaaaggatacgatgtaacaactgcgattgatgcatttaatgaagaccaagcatcattagaaaatggccatagcccattgattgatgccagtatgaactaccatgaaataattagtagtatcaagaaccctgctttattacagtcatttaccaagacagttaaggtggtcaaagcacttattcgtcgatacgggaatccatataccattcacatcgaaatggctcgtgagttgagtttaggtaacaagggcaaagctgaattaattaagaaacaaaacgaaaatcgtaaacgcaatgataaagttattaccgaaatgaaagaaaattttcccaatgtttcgattaatggtgaaaatattattaggttaaagctttatcatgaacaaaatggaattgatatttatgacggtcgaatgattgattaccaacatgtcttagataataattacgaagttgaccatatcttgccttacagcattagttttaataatagttttaataataaggtattaacctctagtcgtaataatcaactcaaacgaaatcgtaccccttatgaatggttacacaacgataaagttcgttgggatacattcacgtcgattgctgaaaatgtaagaaattatcctaaaaagaataacttattaaaaatgcactacgatgaaagtgacatgaagaaatggaaaacacggagtttaaacgatacccgttatgccacccgattgctatataactactttaaacataatgagcaatattttgatgcaaagccttcagtcatgacaatgaatggtagcatgacggcccaattacgttattattggggaattgttaagcaacgtgccgctagtgataaacatcatgcggtagatgcttgtgtgattgccacttgttctaattcaatggttaatctaattagcaagtatcatactgctcgtgaaaaagaacagttatcctctaagttccctatgccttggccagatttccgcaatgacgtgatgaatgctaagcaacagatgaacgttaaaagaatctttagccacagtattgctggtaaggtgaacgaggatggactaaaaggtgccagatacatcaacaccgataaagtagttgttatacatgaaaaactagctaatttaaagctcaaaaaagttggcgatgattatatcattgttggacacggtaattctcgctatttgcgtccagacgatttaaccagtatttcaaatcgtaatagtaaaaatgacttgaattcggtcatttatgaccatatttataatgctttatctaaggataaaaaagcttttgaaaagcaaccttatttggaatttgagcataagggacataagtatactgttagaagagtaaaagtgattagcgactataagggtggtgtcattttaaatcgcgatgcggatggtaaccctatttcagtggcaaaccgtggtaagatggtgcgcaacgatatatttaaatgtctcgataagaaggaaagagtcgtataccgttttgtccccatttatgagcatcaaattttagatacacacttacctaatcaatatgctccatttgctaaaaatatttttgtgaatgataaagaccaatttatttgttctttgagtaagggggatgcggttgaagtgaaacttagcactcctaagaaagtagaaaattgtgatgagccatatgtatgtgatcattttattggttattttgatggatcagatatcagtagtaatcgaataaaaattaatgcattagataattcttgttcaattcgcgcctctatgagtaaattgattagcattcaaaaatgtgatgttaccatttttggtagtattcataaggtgcatgagaaagtgcgtcaacctttcaacttgaagcataaataa

SEQ ID NO: 337 - DNA, 4089 bp, Lactobacillus paracasei subsp paracasei 8700:2
atgacaaagttaggtaaaccatatggcattggagtcgatatcggctcaaactcgattggatttgcggctgtggatgagaacagtcatcttattcgattgaagggaaaaacggttattggggcaagactgtttgaagaaggaaaagcagcagcgaaacgccgagcaggtcgtaccactcgccgtcgtttgagccgaaatcgttggcgactcagttttttgcgtgatttttttgaatcgcatattacgcctactgacccgaatttctttatgcggcaaaagtactcggaaatctcgccgaaggataaggcccgttacaagtatgagaagcggctttttaatgatcggacggatgctgagttttatcagcaatattcgacaatgtatcatttgcgcaatcggcttatgactgatccaagcagagcggatgttcgcgagatttattttgccattcatcatattttgaaaagtcgcgggcattttttgacgccgggagatgccaaggatttcaatacaaacgatgtggcgttagacgagatttttcctgcattgcaggatgcctacgcccaagtttacccagatcttggcattacttttgatgaggacaaagcgaatgagtttaaaacaattttgctgaatgaaatagcaacgtcaattgatacgcaacgagctttagtcaaactgttactggctgaagaagacgacaaggacatcttgaagcagcagaagcaggttttaaccgagtttgctaaagctgtggtcgggttgaaaaccaaacttaatctagcgttaggaactgaagttgatagttctgaagccactgcttggaacttttcattagggcagcttgacgataaatgggctggcattgaatcggctatgaccgatgaaggaacggaaattctggaccagattcgggatctgtatcgagcccggctccttaatggtattgtgcccacaggaaagacgctttctcaagctaaggttgatgattatacacaacatcatgaagatctccagttgtttaaagcctatttaaaacaacttgaagatgatggaacggctaaagcaatccgacagctttacgatcgctatatagacggtgacgatgctgcgccatttttgcgagaaaattttgttaaagcgttaactaaagacgtgacggctcatccaaacaccaagtctcctgaactgcttgaacgtttggcgcaaccggacttcatgctcaagcagcgcaacaaagcgaacggggctattccagtccaaatgcaacagcgggaattggatcagatcatcaaaaatcaagctgtttattacgactggctggctgcgccaaatccggtggaaaagcatcggaaaagtatgccttatcagttggatgaattgctgaattttcgaattccatattatgttggaccattggtgacggctaaagagcaaaaagcagcacaaggcggggtttttgcttggatggttcggaaagatcctgaaggtaatatcacgccttataattttgacgaaaaggtagatcgcgaagcttcggctaatacctttattcagcggatgaagacgaccgacacttacttgattggtgaagacgtgttgcctaagcaaagtttgctgtatcaacgctatgaggtgttgaatgaactgaataatgttcgtgttaataacgagaagcttagcatcgaacaaaaacaacaagttattcgagaactgtttgaacggcataatagtgtgacaattaaacaatttgccgaaaatctgcgagcgcacggtgattacgcccacattcctgaaattcgtggtttagctgatgagaaacgttttttaagttcactttctacgtaccgtcaactgaaaagtcttttacccgaggcaattgatgatccagccaaacaagccgatattgaaaatatcattgcgtggtcgaccgtttttgaagacgcagcgatctttaaaacgaaattgaaagagatcagttggctcggcagcgaagccatcacgaaactaagcaacattcgatatcgggggtggggccagttttcgcgcaagtttttaaatggtctgacccttggcaacgggcatactatcattcaagaattgctcctgtccactaacaacttgatgcagatactaacagatgaaacgctacaaaagaaaatgaccgagctgaacgctgataaattgaaaacagcgaatatcaatgatgcgattgataatgcgtatacatcaccaagcaataaaaaggcattgcgtcaggttcttcgggttgttgatgatattaaacgcgctgcggatggtcaagatcctagttggttgtacgttgaaaccgcggatggcggtggtacaccaggcaagcgcactcgtgcgcgtcaacatcaacttcaggaaatatacgcgaatgcggcccacgagctgattgatacggcagtccgcggtgaattggaagataagatttcagataaggccgatttcaatgatcgactagtgctgtatttcatgcaaggtgggcgtgatatctacactggtgcgccactaaatattgatcaactaagtagttatgatatcgaccatattctgccacaatcgctaatcaaagataactctttagataatcgtgtattagtgcacgctattatcaaccgagagaaaaacgcaacatttgcatcaaccatctatgctcaaaagatgaacgcgacatggcgtcaatggcatgaggcagggctgattagcggtcgcaaactgcgtaatctgcaaatgcgtccagatcaaatcgataagtacgcgagcggctttgttgcccgacaattggtggaaactcgacaaatcatcaagctgacggaacaaattgtagcagcgcagtaccctgataccaaaattatcgccgttaaagcaggtctttcacatcaattgcgggaagaactcgaattccctaagaatcgtgatgttaatcactaccaccatgcttttgatgccttcctagccgctcggattggtacctatttactcaagcgattccctaatttacaggctttcttcacgtacggcaagtttacaaaagccgacgtcaaaaagcttcgcgggttcaactttatccgtgatatcacacatgctgaagataaaattgtggcaaaggataccggcgaggttgtatgggacaaacaacgggatgttgatgagctggatcgaatctataactttaagcggatgttaattacgcatgaagtccgctttgaaacggcggatttgtttaagcagacggtttatggggccagggattcgaaggaggctggcgggtcgaagcagctcattccaaagaaaaaaggatatccagttgatatttatgggggctatttcagagagaacacggcctatcttgccgttgtgaaagtgaccaaaaagacagagacaatctttaaagttgtcaaaattgcaacttcccaggttgcagctttgaataaagcaagatcacggtcaactgctgaggagctttcagtacttactgaactcctaaagccaaaatttagcaaggtcgggaaaaatggtaagatcactgatacaccattcgaggttgtgcttccgcgagttccgcgtgaacaacttttctataatgcaaagtatggtttctttatggttaactcagataccatgtttcacaatttccaagaaatttgggtgtctcgttcagaccaaaaaattcttcaacaaattagaaaagccaagattgactatcctaatgttgatcaagatttagacaatctttttcacaatttagccgatcaaattgtcaaatattttgatttgtattctattgcagggtttaaagagaaaatcagtcaaagtcaaaatactttcaatgatttggcggttgatgatactgaccagagtgtaggtaagataacggtcattaatgaattgttaaagggagcacaagctaatggcatgacgggaagcctaaaagttttaaagataagtaccccatttggatttacgcaagataaaagtggtgttcttacaaaagatagttccatcatctatcagtcaccaacagggctttttgaacggtctgttcgcctaactgacctgtaa

SEQ ID NO: 338 - DNA, 4089 bp, Lactobacillus paracasei subsp tolerans Lpl7
atgacaaagttaggtaaaccatatggcattggagtcgatatcggctcaaactcgattggatttgcggctgtggatgagaacagtcatcttattcgattgaagggaaaaacggttattggggcaagactgtttgaagaaggaaaagcagcagcggatcgccgagcaagccgtaccactcgccgtcgtttgagtcgaaatcgttggcggctcagttttttgcgtgatttttttgaatcgcatatcacgcctactgacccgaatttcttcatgcggcaaaagtactcggaaatctcgccgaaagacaagtcgcgttacaagtatgagaagcggctttttaatgatcggacggatgctgagttttacaagtatgagaattgtccgacaatgtatcatttgcgcaatcggcttatgactgatccaagcaaagcggatgttcgcgagatttattttgccattcatcatattttgaaaagtcgcgggcactttttgacgcctggggatgccaaagattttaatacaaacaaggtcgcagtaaacaagattttccctgcattgcaggatgcctacgctcaagtttatccggatctggacatcacttttgatgagaacaaggtgaatgagtttaaaacagttctgttgaatgagaaagcgacgccaagtgacacgcagcgagctttagtcaatcttttgttggctaaagaaggcgacagggacatattgaagcagcagaagcaggctttaactgagtttgctaaagcagtggtcggactgaaaacgaagctcaatgtggcgctagggaccgaagttgatagttctgaggccactgcttggaacttttcattagggcagcttgacgataaatggacaggcattgagtcagccatgactgatgaaggtaccgaaattctggaccagattcgtgatctttatcgagctcggctccttaatggtattgtgcccgcaggaaagacgctttctcaggctaaggttgatgattatgcacaacatcatgaagacctcgaattgttcaaagactatctaaaacaacttgaagatgatggaacggctaaagcaatccgacagctttacgatcgctatatagacggtgacgatgctaagccatttgtacgtgaagattttgttaaagcgttaactaaagaagtgacggctcatccaaacgccaagtctcctgaactgcttgaacgtttggcgcaaccggacttcatgcttaagcaacgcaacaaagcaaacggggctattccagtccaaatgcaacagcgggaattggatcagatcatcaaaaatcagtctgtttattatgactggctggctgcgccaaatccggtggaaaagcatcgaaaaagtatgccttatcagttggatgaattgcttaattttcgaattccgtattacgttggaccattggtgacggctaaagagcaaaaggcagcacaaggcggggtttttgcttggatggttcggaaagatcctgatggtaatatcacgccttataattttgacgaaaaggtagatcgcgaagcttcggctaatacctttattcagcggatgaagacgaccgacacttacttgattggtgaagacgtgttgcctaagcaaagtttgctgtatcagagttatgaagtgcttaatgagttgaacaatgttcgggttaatgacaataaattaagctttgaccagaagcagcaggtcttaggtgaactttttgaaaggcataacaccgtcactattaaacagtttgttgacaatttacttgctcatggggattatgaccgcattcctgaagttcgtggtctggctgatgagaaacgctttttgagttcgttgtctacttataatcagcttaaggggattttgcatgaggcaattgacgactcggataaacaaactgatatcgaaaatattattgcttggtcaacgatttttgaggataaggcgatttttaaaacgaagcttaacgaaatcagttggctaaatgctgggatgattaacagtttagccaatattcgttaccggggatggggacagttttctcataaactattaaatgagttaacgctcagtactgggcgcacagtttttgaagaactacttatatctagtcataacctgatgcaaattttgacagacgaggtactgaagcagaaaatcgccgagttaaatgctcatgaattaaaagcatcaggtatttatgccgcgattgatgatgcttatacgtcaccgagcaacaagaaagctttgcgtcaggtacttagcgttattgatgacatcacaaacgctgctgggcaagctccaaattggctctatattgagacagcggacggagacggagtacccggaaaacggacgaattcgcggcaacgaaaaattcaagagatctatgcaaatgctgcccaagaactgattaccggcagtgttcggggagaacttgaagataaaattgccagtagagctgactttacggatcgcttagtgctttattttatgcaaggcggccgtgacatctacacaggcaaaccattgaatatcgataatctaagtagctacgatattgatcacattctccctcaatcgttgattaaagataattctttagacaatcgcgttcttgttcatcccctcgtcaatcgcgaaaaagatacaatcttcgcttcgacgcgattcgccaaacaaatgaatggaatgtggcgtcaatggcatgcagcgggattgattagtagtcgaaagctgcgaaacttacagatgcggcctgacgaaattgataaatacgcgagtggatttgttgctcggcaactggtcgaaacgcgacaaattatcaaactcactgaacaaattgtggcggatcaatatccagacactaagattatcgctgtcaaagcgggactttcatctcagttacgcaaagaactggactttccaaagaatcgcgaggtaaatcactatcatcacgccttcgatgccttcttagctgcgcgtatcgggacgtatctgctcaaacggtatcctaatcttgaacccttctttacctatggaaaatttaaaaagacggaagtaaagaaattaaagagcttcaactttattcgtgacatgacacatgcaaaagataaaatcgttgccaaagagaccggagagattgtctgggataatgcaagtgatatcaatgagttggatcgtatttacaatttcaaacgtatgttgattacgcatgaggtgcggtttgagacggcaagtctatttaaacaaacactttatgcagccaaaaattcaaagaatcgcggcggatcaagacaactaattccaaagaaaaaggggtatttagttgatatctacggaggatatacgcaagaaacgggtagttatttatctgttgttcgactaacaaaaaaagcgatgtacgctgtcgtgaaagtatcgacgagagatgctgctaaattggcagttgctaagagtatttctgagcaaaaggaaaatgaaacgttaaaaaagattattgatggaaagctttcaaagacaagcaaaaagggaaaaaccacacatcaattatttgagattgttttacctcgggtggggcaaaagaccttatttaaaaatagcaaatacaatcaatttctagttaattcggatacctacatgcacaattaccaagaactgtggatgccacgtgagtatcagagaatgtggaaagatattttgctatctaatcacggtgatgctcagttagaaggccagttagatcaaattttcaagtttattgtttctcaagtgaacagctactttaatctatatgatattaatcaatttcgtaaaaaaatagccgacgcaactgataagttcgctaaacttccaacgcatgatacagataacgcacgagggaaaattgcgacaataggtcaattgttaattggccttcaagcaaatgctatgagaagtgatttaaggaatctcgatataaaaacacctttcggattattacagattggtacaggaataaccttagacttggacacctccattatttaccagtctccaacaggtttgtttgaacgagaagttcccttaaccgatttgtaa

SEQ ID NO: 339 - DNA, 4107 bp, Lactobacillus paracollinoides DSM 15502
atggataagaaatatagcattggcttagatattggtaccagctcaatcggatttgtcggggttgatgaaaacggttggccactaaatatcaaagggaagcgggcaattggtgcacatttgtttagagaaggggaagcggctgctgaaacgcgtggtttcagaacgacacggcgccggtacaatcgccgaaagtggcgattgcggttactcagagagatatttgatgaacctatcagtcgggtagatcctactttttttgctcggatgaaagaatcctcagtatctccaaaggatcctaactatgacggtttagcgaaagaaattttgattccaagagataaggatggaaagattctttatccgacaatctatcatttacgtcacgcactgatgtatgaagatcaccaattcgatattcgtgagatttatttagctattcaccatatcgtcaaataccggggccactttttactggacggtgcggctaagaactttgagtcctctaatcttgatctaaaaagtgacattcacgaaataaatgctattttagtaggcatttttggtaatgaacaggtacagtttaatgatcaatacgttgaaaaattaaaggaagtgctactggatagtacccaatcacgttcagatcgacagaaagctgctgcaaaattgttgttgccaacaaatgatttagacaaagatacaacgaaaattctaaaaacagtttcaactgagattacgaaagccatcacaggattgaaagcaaaattttttgtgataaccggcaatgatatcgcaaaagaccaacaaaaggattggacttttagcattgatacattggacgaaaaaatgagcgttattgaaccctcattctcagaaaagaacttttccttaataacaattctacagaaattgtattctagtgtgacgctggctggaatagttccaaatgggcttagcctatccgaagcaatgattcagaaatatgataggcatgcgtccgatttagttttgctcaaaaagtattgggacactaagccaaaagttttgaagcaccagcttcaaaacacttatgcagaatatattgaaatccatcaggtagttgatgagttctacagtgatcttagtaagttaattaaaaatgatgatgacactctagcgcaagaaatcaagtctaaaataacgattggaaattttttgccaaaacaacggacaaccgaaaatggtgtaatcccatatcaattgcaacaaagagagttagatacaattataaaaaatcaacaagaatattatccatggttagctgaggagaacccagtcgctgaccatcaaattgcatttccatacaagttagatgagctagtcggattccgaattccctactatgtaggaccgatgatagcgaaggaagatacttccaattcaaagaatagtaaatttgcctggatgattcgtaaacagagtggtgaagtaacgccttggaacttcgatgaaaagattgatcgcacagcgtcagctactgcatttattgatagaatgacaactaccgatacttatttaattggtgaggatgtattgccaaaacaaagtttaatctatcaacgttttgaagtgctaaatgagttaaataagatttctatcgatgggcaacccattactcgtaaacaaaaacagagtgtatatacacacgtatttgaaaagaagaaaacggttcaggttaaggatgttcaaaaatttttggttagctcaggagaggttatgagtttgccaaagattggtggtttagctaatgaaaaacaattcaatagttcactatcaacgttatatgattacaataaaataattcctgacgcacttgaagatagaaataaagttgatgatatcgaaaaaataattttatggtcaactatttttgaagacaactcaatttttgtggaaaaactggattcaattgactggttaactagcagtcaaaggaaaagacttgctcaaaaaagatatcgtggttggggtcgattgtctttacgattactcacaacttttaaaaataaagatggttacagtatcttagatgaactgtggaactctaatcataattttatggaaattcaagcacaatctgatttttctgaacaaatcgcaacagcaaacaataataatttgagtcaagttcttcctgccaaatgggaacctggacgcaagaatttggcatcgttggatgaattcatttctaatctgtatacttctcctcagaataagaaggccttgcgtaaggctatcagagtggttcaagatatgatgacagcagccggccatatgcctgaaaaaatctttattgaagtcgcacgtgacacgtcaaatagtcaccaacaaacaattgctcgccaaaggcaattacaacagctttatcaatcggaagataaggaagtcattgattctagtgttcgtagtgagttagacgatattttaaaaaatcgagctaatatcaaagatcaattattcctgtatttccaacaaggtgggcgggatctttatacaggaaaagcaattaacattgacaaattatcgctatatcatattgatcatatattgcctcaatccttggttaaagatgattcattagacaatcgcgttcttgttagtcaaaaaaccaatgaggacaaaggtgttacattcgtctcagataaatacatgaataacatgttgccaacctggaaacgatggcatgaaatgggactgatttctgccagaaaattaaaaaatctaacgatgagaccagatgaaattgacaaatatgcacccggttttattcaacgacaattagtagaaacaagacaggttacaaagctagttattgaacttcttgatgctttattaggaaacagtcaaacagaaatcatcacaattaaagcgtcactttctcatcaattcagacaacagtttgatctcgttaagatccgtgaagtaaatgataatcatcatgcatttgatgcttttctagctgcgcgtatcggcacttatctatataaaaggtatcccaaactgcgaccatattttgtgtacggtcagtatatgcaaaatcataaaaatttaaaaagtatcaatctaataaagacgcttgattctgataaagcaattgttgatgaaggtactggagaaattctatgggataaaaagtcggacttagctaaaatgataaaaatatataattatcaacgtcttttaatcacccatgaaagtcgtacaagcttcggggcaatgtataagcagaaaattttaaaggcaaccgacgcaaaacaaaacggtggaggtttcaagttggttccaaccaaacgtaatcggccagttgatatttatggtggttacactggtcagactgccgcctatttgacaattgtcagagtctattcaaaaaaaacatctgaacttcgagttttgccaatctatacaaataaggtacagcaaatagagaaagcgatgacgcaaggcgataaagctactatgttagcatttaaaaaagtcattgcacctcaattaggtaaagaaaataaaaagacacatgaaataaaaatccctgaatttgatgttgtgattcccaaggtcttactagatcagttagtgattgatgatattgccggaagtccacaccgatttagacttggaacagatacgtattatcataattctcaacaattatttttaccgttatcgatgcaaagacaactaatggatcgtgagtcagatgataaagtataccttgatattttcaatgatgtacttaagcaagtagatagttattttaatttgtatgatgtgaatggctttagagcagctctgcaaaagagtaaaaaagccttcgagcaattaccgattaatgattttcctaaagatgtgccagacaataaaaagaagaaaggaaagcgttcaattttaaaggagatttttattgggctacatgcgaatgcaacattaggcaacttaaaacaaatgggcattaaaacagattttggaaaattacaaaaaagtaacggtttacggattactgagaattgtaaaattatccatcagtcgccgactgggttgtttgaacgaatcgtaccgattaaataa

SEQ ID NO: 340 - DNA, 4161 bp, Lactobacillus parakefiri DSM 10551
atgtgcctgaaggagtttactgggcaacattattttgaggagttttatcgtatgaaagttaataattatcacataggtctcgatatcgggacatcgtcaattggttgggtcgcaatgggagaagacggcaagcctttacgcgttaaagggaagacggcgattggtgcccgactattccgagaaggcaacccagctgctgatcggcggatgttcagaacgactcgtcgccgtctgaacagacgaaagtggcggttgaaattattggatgaaatatttgatccatatatcacacctgtggacagtactttttttgcccgtttaaaacaatctaattggtcgcccaaagattcacgtaaggcattcaaagactcaacgctgttcccagatttaaccgacaaacagtaccacctcgattacccaaccatttatcacttacgtcatgcgctcatgactcaggataaacagttcgatattcggatggtgtatttggcacttcatcacattgtcaagtatcgtggaaatttcttaaattcaacaccggtggattccttcaaagcatcgaaagtgaattttgatgatcaatttaaaaagttaaatgagttatatacagcaataaatcctgaagaatctttccaaattaatttcgcaaatagtgaaaagatcggccaacaatttcttgacccatccattcgtaagtttgataagaaaaagcaaatttcaaaaattgtcccagttacaatggacgataaagccgtggacaaacttaacggcaagattgcttcagaaatcgtcaatgctattttaggatataaatccaagctggatgtggccgtgcagtgtgacccagaagattcaaaaccatgggcggtgaaatttgatgatgaagatattgatgccaaactgcagaagattttacctgaaatggatgaaaatcagcaatcgatcattgggatcattcaagacttgtattctcaagtaaccttaaaccaaattgtcccaaatggaatgtcattatcagaatcaatgattaaaaagtacaacgaccaccatgatcacttgaagttatacaaaaagttgattggtcagatttcagattccaagaagaaaacagcattgaagaaggcatatgatcaatatgttggcaacgatggtaaagtcatcgaacaagatgacttctattcgagtgtgaaaaagaatttggatgattcagagttatcaaaacaaatcatggatctgattgacgctgacaaattcatgccaaagcaacggacatctcaaaatggtgtcattcctcatcaactccaccaaagagaattggatgaaatcatcgaacaccaaagtaaatattatccttggctggcagaatctaaccctaacaagcatgatctgcacctggcaaaatacaaaatcgaagaactggtcgcctttagaatcccatactatgtcggtccaatgattactcctgaggatcagaaaaagtctggggccgcagtcttttcttggatgaaacgcaaggaaccaggtcaaattacgccttggaactttgaccagaaagttgatcgaatggaatcggccaataagttcatcaagcggatgaccacgaaggacacttatttaattggtgaagacgttcttccagacgaaagcttgctgtatgaaaagttcaaagtgcttaatgagttgaatatggtccgggtaaatggtgactcgttgaaggttgctgacaaacaggcgatttatcaagatctgtttgaaaattataagcacatctccgttaagaagatgcagaactacattaaagataaaactggattgccaaacaatcctgacatttctggtttatccgatcctgatcattttaataattcattaggaacttacaacgacttcaaaaagctcttcggcgataaagttgacgatcccgacctccaagatgattttgagaagatcgttgagtggtcaactgtctttgaagacaagaaaattctgcgggccaaactcaacgaaatttcatggttgtctgataagcaaaaggatgatcttgaatccagtcgttaccaaaggtggggccgactttccaagaaactcctgactgggattgtcaacgatcagggtgaacgaatcattgacgaactttggaacaccaacaagaacttcatgcagattcaatctgacgatgactttgctaaacgaatccatgaagccaacgccgatcagatgaaggcaactgatgtggaagacgtcttggcagatgcatacacttctccgcaaaacaagaaggccattcgacaagtcgttaaagtggttgatgacattcaaagagcaatgggtggtgttgcacctaagttcatctcaattgaatttacccgttcagaagaccggaatccgcggcggacaatctcacgtgaacgacagctcgaagataccttgaaagatactgctaagaccttggttaaatccatgaaccctgacattctatctgaattggataatgcttcgaagtctaagaagggtctgactgatcgcctgtatctttacttcactcagcttgggagggatatgtatacgggtaagccaattaatatcgatgaaatcagtaattatgatattgatcatattttgccacaggcgtttatcaaggatgattcattaagtaaccgggtgcttgtatcaaaggcagtgaacaatggtaagtcagctaatgttccactgaagctgtttggcgtcaaaatggctcacttctggaaacagcttgctgaagcgggattgatcaataaacgcaaactaaagaatcttcaaacgaatcctgataccattagtaagtttgccatgcacggttttattagacgacagttagtggaaaccagccaggtgatcaagcttgttgcaaatattcttggtgacaaatatcgcaatgatgataccaagattattgaaattacggctcggatgaaccatcagatgcgagatgagttcgcctttatcaagaaccgtgaaatcaatgattaccatcatgcctttgatgcttatctgaccgcattcttaggcagatatctatatcacagatatattaagctacgtccttacttcgtttatggtgacttcaagaaattcagagaagataaggttaccatgcgtaatttcaacttcctgcatgatttaacagatgatacccaggcgagaattgctgacaccgaaactggtgaggtaatttgggatcgcgaaacttcaattaagcagttgagggatgtttatcattataaatttatgctgatttctcaagaggtatacactctccgtggggcaatgtttaaccaaacaatctatccagcagacgaggccggacggaaaaagttgatcccaacgaaagcagataaggcggttgatgtatatggcggatacagtggtagcaacgatgcatatatggcgattgtccgaattcacgataagaagggtgataagtacaaggttgtcggcgtgccaatgcgggcgctggatcggctgaatgctgccaagaatgtgagtgatgccaaatacgaccaagtcctcaaagatgtcttgacgccacaatttacaaagtccaagaaaagtcggaaaactggggaaatcagtcaaacagttgaagactttgaagttgtcttgggtaaagtgatgtaccgccagcttgtgattgacggtgataagaagttcatgcttgggagttcaacttatcaatataatgccaagcagctggtcctgtctgatgaatccgttaagacccttgcaagcaaaggaaagctggatgaggcacaggagagtgctgcgtatgataacgtctatgatgagattttggataaggttgatcggtattttgcattgtatgatcaacgtaattatcggacgaacctacatgaaggggaacaaaagtttattggattaccactacatgatacttttgatggaagtaaaaaagtggccaacgggaagcgcgaaaccatctcggatattttaaatggcctgcatgcaaatgcaactatgactaatctgaaagttcttggtatatcctcaccgtttggaatgtttcaatcacatggtcctattaacttgaatcctgaaactataatcttatgtcaatcaccaactggattatttgaacgtcgtattattttaagagatctataa

SEQ ID NO: 341 - DNA, 4086 bp, Lactobacillus pentosus KCA1
atgaacgaaccgtatggtgtgggcttagatatcgggacgaattcggttggctggaccgtcgtcgatatgaacggacgtgttagaaaggtcaagggaaagacggctcttggggcacggttatttaaggagggtgcaactgccgaggatcgtcgtggctttcggacaacccgacgccgtttaaagcgggtaaagtggcggttgcgattgttacgtgaattttttgatcaaccaatcagtaaaatcgatcctaacttttttgcccgacgtaagtattcggatatctcgcctcgagacccgaactacaatggattagcaaaaacgctgttcaatgaccggaccgataaggaattttatgatgactatgccacaatttaccatttgcgagacaagctgatgacgagcaaccggaaatttgacattcgggaaatctacttggcaattcatcatattgtcaaataccgcggaaattttttgcgtaccggaccagccagtcaatatggtagtgcaagcttgcatttagcgactagcttccagaagcttaatgatctgtttgctcagtccgaggagacgttaaatcttaagttggtaactgatgaggcactgcttcaacaaatccagcagatcttagtacggacagacttgtcacgttcggaacagcaaagacaaatttggccactcatggcagttttgacgggagcgagcgctgctgaaaagaagcgtcaaaagaatgttgtcgttgaactgtcgaaggcgctggttggccttaaagcgaagatgaacgtggtgacattaacggaagtcgatgccgcagtagtaaaggattggacctttacgatggaggaaagccaagacaagcttccggaaattgaagaacaactaagcgaagttggacaacagattatggatgaagtgatccaactatatgctagcgtcaacctcgcgcaattgattccagcaggtaagcgtttttcacaacacatggttgagaaatataagcatcatgaaaagaatctagagctgttaaaagcttatattcactcacagtctgattcaaaacgtgggcgtgagattcgcgcaacctatgaccgatatatcgatggtgtcgatagcaaaccagttacgcaggaaatgttctacaaagatttaatgaaatacgttgaggctgatgctacatcgaatcatctggcagcagagattaaagatgaaattgactcggaacaattcatgccgaagttgcgtaccaagcagaatggctcaattccatatcaagtccaacaatatgaattagatcaaataattagtcatcagaaaaagtattatccatggcttggtgaagaaaatcccgttgctgaacggcgcggcaagttcccatataagttggatgaactagttggttttcgggtgccttactatgttggaccactcattacaaaagaggaccaacaagccacttctggcgctgggtttgcgtggatggtccgtaaagcagatggtccaatcacgccatggaattttgatcaaaaagttgatcggattgcttcagcaacggcgtttattcaacggatgcaaacaacggatacttacttgattggtgaggatgtcctcccagcacgtagcctgatttatcagcgcttcatggtgctcaatgaattgaataatatgcgagttgaggatcgaaaactggcgccgcaacaaaaacaacgtttgtataatcaagtgtttaagcaacatcaacatgttagcgtcaaaaatattcagcagaatttgatggatgccggtgagtatcgaaaaacgccccaaataacggggctcgctgaccctaaaggattcaatagctcgctatcaacgtatcatgatttcaaaaagattttgcttgaagcaatcgccgacgaacataagcgggctgatattgaaaaaattattttatggtcaacgacgtttgaagacagtgccatttttaagcagaagcttgaagaagtggcctggttgacggatgcccaacgtaagcagcttagtggactgcggtaccgtggttggggacagttgtcgcataaattactgaccgcctttaaggatgacaaagggcgttccatcatggatggcttgtgggagaccagcgataactttatgcagctgcgtaagcaacctgcaattgaaacgcagattaaagaggctaatcaagctaacctaactgatgcggatatccaagataccatcaacgaattgtacacgtcgccgcagaataaaaaagccattcgtgaagtgatgctggtactagacgatatcaagaacgcgatgcatgggcaaacaccaagttggattttcgttgaagcagcgcgtggcggtggcgttgcgggtcggcggacgcaatcacggtccagccaaattgtggaagcttacaaaggcacagccaaagagatcgttagcgaaaaagttcagcatgaattgaatgaaaaaattaaagccaaggctgattttaatacgcggcttgtgctctatttcttgcaaaatggccgcgacctgtacaccaatgaagccattaatattgaccggttatcagagtatgatatcgaccatattttaccgcaatcattagtcaaagatgactcgttagataaccgggtgctgactagtgcgcggattaatcgagagaaaaacgatacgtttgctagtgagaaattcggtcgtaagatgggcgcgcaatggcgagaattacatcggaatggcttaatgacacaacgcaaactcaagcacttgctgatgcgaccagatgagattagcaagcatgcgacggactttatcaatcggcaattggttgaaacacgtcaagtcatcaagctggtggaagaattaatcagttcggaatacccagcagcgtcaattgtggccgtcaaagccaatctaacgcaccaattccgacagacattcaactttccgaaacttcgtgaagtcaatgattatcatcatgcgtttgatgcgtccttaacagcgtttatcggaatgtatttattgaaacagtatccgaagttggaacgattcttcgtttatggcaagtttgctaagcagccgattaatttgacgcggttcaatattattcgcaagctggcagttgcggagaaaccaattgccaatatcgaaacaggtgaaattctgtgggataagacagccgatattaagtattttgaaaagctgtacaactacaagcgactactagtgacgcatgaggtgcgagagaattatggtgcgatgtttaagcaaacattgttcaaggcatcttataataaatcgaagacactggttccaaagaaaaatcatatggagacaagcgtatatgggggctattctaatcaagagacagcttatctggctattgttcgcattccgtttaaatcaggctttaaatttatagttgttggtattcctactcgaatggtagctaaaattaagcactatcagagcctgggtgcaactctcaatcaagccacacataaggtgattgagcccaagtttacgaaaatcagtcgtaaaactaagcagacggtgataagtgattatgaagtggtacttccaaaagtatacttggatcaagtcgttcgagatcaagtaaagggccaaatgtatcgtttctctctaggatcagataaggaatatcataatgtgcaagaattatatttgccattgtcgattcaacaggcatttgttggacactatgatgagtctgatgatcaacgttcaaacgatttagtaaaagtttatgatgcagcgttgaaacaactgcaacgatatttcccactgcatttgtcacgaaactttgaccaggtggcaagtcaagcacatcaaagttttgaggggctgaaaaacaatgtgcaaacaagtgataaacaattgggtaagaaagaggtgctcaatagtctatttgttggtttgcacgcaaatgcaacaaggtcaaacttgagtgtgctcgggatgagtaaagattttggacggataaaatcaaacggcattacattaaccgaccaagcagaaattatttatcaatctccaacaggattatttgagcggaaagtggcactaaaagatttgtag

SEQ ID NO: 342 - DNA, 4149 bp, Lactobacillus pentosus IG1
atgaagaaaatagttaattataacctcgggctagatatcgggactagctcaattgggtatgcggctattgatgatcaggggcgtccagtacggcatcaaaataagacggttatgggggtacgactttttaaagaaggcaagactgcagaaagcacgcgaatttttcgtggcactcggcgacgcttgagtcaccggcactggcggttaggttatttagatcgaatctttgacaatgagattgccaaagtggatgaaaattttttaccacgtctaaaagcgtcaaagcgtgctcggagtgatgaaaaacggtcatttagaggatcattgctatttccggaaaccggtgatgacgcctattatcaaaagtatccaactatttatcacttgcggtacgcgttaatcacccaaaagaaacaatttgatattcgactcatatatctggcgttacatcacatgattaagtatcgcggaaactttctggacacaacgcctgttagtgcattcaatattcacgatattgatctgactgatcagtttgcatcattaaatgattgttatcagttgcttgatatggattttgagtttcagtttgacctcaacaatattgagcaagttcagaagttgctgttagatgaaacactatctaaaacgaaacgtcaggcggctgtgtccaaggttctggttatgtcaacagggaacaaagcctttgatgatcagcaaaatgggattgctagcgagttcatcaaggcgttgttgggtggaccatttgacttatctaaaattttgaacttgtcagtcgctgacgtaaaaagttggaagcttcatatgaccgataaagatgttgatgacacgctcaatagcttggtagaagagcttgatgaaaatcataagcagattgtgaatttattgcagatgatctattcgcaagtaatgatgctagggctcctaaatggtcagcaatcaatatcagcatcgatgattgaaagatacgatgatcatgcaaagcactgggcagccttaaagaaattgctgcctgcattaggtgagcaagaacagtcgacgattattcacgcgtatacggcctacacagggcacagtcgcactaagcaactatctcgagctgaattttacacaaaggtgaactcaattcttaaaaagcatgaaaacattgcggaagccacaggtctcatagagctaattgaccgcaatgaatttatgccaaaacagcgtgatgcagtcaatggggtcattccacaccagctacatcaacgtgaattacaactaattattcaaaaccaacagaagtactatccgtttttagcggctaaagcttatccggatgctgatgaaacgatgattgagcagttgctttcatttcgtgtgccttactacgctggtccattagttgaccgggattttattaatgagtctagtgatcaagaacaggccatgcagaacacgaaattttcttggttaaagcgtcgtgaagctggcgaaataaccccatggaattttgagcagaaagtggatgttcaagagaccgccaaccggttcattaagcggctgacgactaaggatacttatttgatgacagaggatgttttgcccaaagagagcttaatataccaacgctttgaagtgctaaatgagcttaatgcgattcggattaatgatcgtcggttgacggcggaaaataaacaattagcttttcaacaattatttatggctggcaatactaaaaacgtttctatcaaaaagtttcgtaacttcgtgtttgatagtctaaaatttccggaaaaagtaaaaatcaccggctttgcaggtcagcataattttttggcaaaactatcaacttaccatgactttaagaaaatttttggtgaacgagtcgatcatactgatttacagcctgatttcgagcgaatcgttgagtggtgcacgatttttgaagaccggcatatctaccgagagaagctcaaggaaattcaatggttatcacagtcagagattgatcaattggttttgattcgtaatcatggatggggacggttatcaaagcggctgttgactggcatacgagattcagatgggagaacagtcatggatcaactttggtttggaactgataacttcatgcgtattatttctcaatcagattttgcggcagctattgcgaatgaaaatcgaactcaactgaatcagcatggcctggaagatgtactggattctgcctttatgtcacctcagaataaaaaggctattcgacaagtgctcaaagtagttgatgatattgagcagactttagggtgcccacctaagaaagttatgattgagtttacgcggagtccagacaagaagaagcaaagaaccgtgacgcgacttgaaaaagttcaacaggcgtacaaagcagttgctgatcaattggcggggcagtcgattgtgagcgaactagatcagtatgctaacacgcacagtaaactatccgatacttattatctgtacttcatgcagttgggacgcgatctatatagcggaaagccaatcgatattgattcgccgatgctggatgacgatcacattttaccgcgtgccttcatgaaggataactcgttggataaccgtgcattgacggaaaaaccaatcaacaacaccaaagcagccaaatttccatccaaagtgttcggacagcaaaaggaggttactgatttttggaagttactacgacgctgtggcttgatgagtaatatcaaagagaagcatttgtatttggaccctgacaacgtagataaatggacacgaaggggatttattcaccgacagttagttgaaacgagtcaggtaattaagattgttgcgaatatcttgaacgatcggtatcaacaaagtcaaacggaagtgttggaagtgcccgcacgattaggtacggaactgcgcgaatgttttggctggtataaagttcgggaggtcaatgactatcatcatgttttcgatgcctatttagcagcctttattggcaattatctttatcgtcgataccctaaactgcaaccttattttgtttatggtaattttgccgaattaaacaaggcacaacttaagaatatcaagagctttaacttcttgtataatattactgataataagcgtgttgtcaaagatattgagactggccaaaccctttgggatgatcagattcgccaacagattcagcatatttatgagtataagtatatgttgacttcccatgaagcattcacacagcataaggaattgtatggacaaactatctatcctagacgtgaattcaagcctggaacattgaaagctatcaagcaagatcagccccaggaattgtacggtgggtataaaaatttaacggctgcttatatgtgtatcgttaaaattcaagcgaggaaaagaagggcggctgagtatcgtgttgtgagggtcgcaactgagagtctatcagcgttacagcaagctaagcgtctaggggtgcaagcttacgagcggtgcttgcggcaagaattggttcgaaataatgaaatcttgcggacgaatgcggatccaaacagtgcacctcgcgaatttgaagtgttgttggatcgcgtcttgtgccatcaaatgattatcagtgatgggcagaagtatctgctaggcagccatgcttataagataaattgcatgcaattggttttgtcaaataattcgatgaagatactgagcacaagcattgtgaaattgaaacaaatgactaatgaaccactagtacaggtttatcgcgaaattttggatgtcgttaataagtattttaccttgtatgatgttaacagcttccgtgagaatttaaatcagttttttgataagttcaggacattgcccataacgaatgagtatgagtctagtaagtctggaaaaaaactgatccaccgtggacaactagaaacgttaaccttaatcttaagggggctgcatgctaatagtgataaggttcaatatggagatcaatctaccctgcttggaggatttcaaactaaagacggaattaagctatctaaagatagtgtgattcagtatacgtcgccagccggattgaatgtgcgaactgtgaaattacgtgatttggagcaaaaggaggctcaaaaatag

SEQ ID NO: 343 - DNA, 4077 bp, Lactobacillus plantarum EGD-AQ4
atgaaagaaccatacggtgtaggcttggatattggtacgaactcggttggctggacggttgtggatgcaagtggtcatgtcagaaaaattaaggggcagactgggattggtgtacggttatttaaagaaggggcagccgcagcagaccggcggggatttcgaacaacgcgtcgtcggttgaaacgggtgaaatggcggttacgattactacgcgaattctttgaccaaccaatcagcaaggtggatatcaatttctttgcgcggcgcaaatattcggatgtttcacctcgtgatcctaattataacggtcttgaaaaaacgttgtttaatgatcggagtgatcaggatttctatcatgattatccaacgatttatcatttacgtgaggcgctgatgactcagcaccgcaagtttgatgtgcgtgaaatttacctagcgattcaccatattgtcaaatatcgcggcaattttttgcgtaatgatgcagcgacagcgtatcgaagtgggacacttgatttacagcagcactttgaaactttgaatcatttgtttagtcaggctgatctggagctgaacttgaacctgacaaccgatgtagcgttgcttgacagcatcaaacaaacattggtacgaactgatatctcgcgtagtgaccgccaaaaattaattatgccactattagcagttttaactggcgcgactactgcggaaaagaagcgccaaaaggcagtggtaacagaatttgcgaaagccctcgttggaaataaaaccaagattgatgtgctgactctaacggacatcgacgctactgaagcaaaggattgggcctttagtttagaggaaaatcaagacaaacttcctggcattgaagaccgttttagcgaagtgggccaacaaattattgatgaggtaattcggttatacgccagcgtcaaccttgcacagcttattccagaaggtaaacggttctcacagagtatggttgagaagtataaacgccatggcgaagatttgaagttattgaaagcgtatattcgctctcagtcagacgccaagcgcggacgggctattcgggcaacctacgatcaatatattgatggtgtgaaaagtaaacaggtgacgcaagaagcgtttcaaaaggccttgggaaaatttgttgacgccgatgtagatttgaatagttgggcagctcaaattaagcaagctattgactctgaacaattcatgcctaaattgcggacaaagcagaatggagctattccttatcaggttcaacaaaatgagctagatcaaattattagtaatcagaaggaatactacccgtggttgggtgaagaaaatccggtcatcaagcgacgcggtaagtttccatacaaacttgatgagcttttcggtttccgggtgccttattatgttggaccgctgattactaaagaaatgcaggcagcaactgccaatgcaggttttgcatggatggtacgtaaggctgatgggccaatcacgccatggaattttgatgataaggtcgatcgggtggcctcggcgaccgctttcattcagcggatgcagacgacggatacgtatttgatcggtgaggaagtgctacccgcacgcagcttgatttaccaacgctttatggtgctcaatgagctgaataatattcgagttgatgatgggcaattaacaccccggcaaaaacaacgactatataaccaagtgtttaaaaaacacaaacgagtaacagctaagaatattcaagacaatttagttgcagcgagagagtttcccactgcgccacgaattacggggcttgcggatccgaaagtattcaatagttcgttatccacgtatcatgatttgaaacaggtgttgcctgaagctatgtcagacgtgcgtaagcaagctgatattgaaaaaatcattttatggtcaactatttttgaagatagtacgatttttaagcaaaaactgacagagatttcctggctgacagcggcccaacttaagcaactaggtcaattacgatatcgtggctggggacaattattacgaaaattattaacaggtctcaaagatgataataatcgttcaatcatggacggcttgtgggagacaaacgctaatttcatgcaattacgaagccaacctgccattgagaatcaaattaaatcggcaaaccaggccaacctaacaacggcggatcttcaagataccatcaatgaattatatacgtcaccgcaaaataagaaggctattcgcgaagtgatggtggtgttagctgacattaaagatgcgatgcatggtcaaacacctaactggatatttgtggaagcggctcgtggtggtggcgttgctggtcggcggacacaatcacggtcaaaacaaattgttgcagcctatcagggaacagctcaggccattgtcagggatcaagtccaacgtgaattaaaagagaaaatcaagaacaaagctaatttcaatacgcggctcgtactttatttcctacaaaatggccgcgatttgtataccggtgatgcgattaatatcgatcgattgtcagaatatgatatcgaccacatcttgccacaatctctggtgaaagatgactcattagataatcgagtactgacaaatgcacgcatcaatcgtgagaaaaatgatacgtttgctagtgaaaagtttgggaaaaagatgggtgctaagtggaaagagatgcaccgaatggggctgatgaccaaacggaagcttgaccacttactgatgcgtcctgatgaaatcagcaagtacgcgactggttttattaatcggcagttggttgagacacgtcaggttatcaaactagttgaagagctgattaatgcagaatatccatccaccgctattgtgtcggttaaagcgaacttgacacatcaatttcgacaaacgtttgattttccgaagattcgtgaggtcaatgactaccatcatgcatttgacgcagccttaactgctttcattggcacctatttgttgaagcgatatccgaagctggaacgattcttcgtctacggtaagttcgctaaacagccggttaacctaacacgtttcaatgttatccgaaaactagctaagactgataccccaattacggatatcgatactggtgaagttttgtgggataagttaaccgatattaaatattttgagacgctttatgattacaagcgattattggtgacgcgtgaggtatccgaaaactatggggcaatgtttgatcaaactctcttgaaggcaagtgataatggcaagcgattaattcggaaaaaacaatccttcgatacagctatttatggtggttatacgggaaaaacgctggcttacatggctatcgtgaaagtatcgactaaaaaggatgtccagtaccaagttgtaggtgtacctacaactatggtgacacaaattgagcagttggaacaacaaggaatgacaaacaagcaagcggtgacgaaagtaattgaaccgctcattgctgccaacaacaagaagatgctgacgtatgaagtgttattgccgaaggtacggtttgaacaggtggttcgagatagaattaaaggtcaaacgcaccgcttcgcacttggtactgatacgtattatcacaacattcaagagctgtatttaccattaactttacagcgcgcatttttaggtaagcagaatgagtctgaagtgcaattaaatcagaatttactgactgtttttgacgcaacgcttgcccaggttaaccgatactttccactttacgagatgaacaagttcaagaagatacttaattctgctcgtgatcagattgagctgctggaagcgaaaaatcaatttgttaagaataagctggttttagggaagcaaggaattttgaccaatatgtttattggcttacatgcgaatgcctcgtatggtgatttaaaggtgctaggtgtgaaaatagattttggtaagttacaggttcctggtggcattaagttaacgggtgacgctgaaattatatatcaatcaccaactggtttgttcgagcgaaaaattgcattaaaagatttatag

SEQ ID NO: 344 - DNA, 4173 bp, Lactobacillus psittaci DSM 15354
atgaaagaagtaaaagactatattattggtctcgatatcgggacaaattcatgtgggtacgttgtaacagataaacaaaataatattttaaagcttaaaggtaaaactgctattggagcacgcctttttaaagaaggcgaagctgcagctgatagacgtgcctttagaactactagaagaagattggcaagacgtcgctggagactaggcttacttgaagaaatctttgatgaggaaatggccaaagttgattcaagtttctttagaagattaaaagagtcagattattctcctaaagatagccgtaaacaatttaattcaattgtttttgaaagtagtgaagcagataaggatttttacgataaatatccaactatttatcacttacgtaatgctttgatgcatgatgatcaaaaacatgatttacgagaaattttcttagcagttcatcatattgttaaatatcgtgggaactttttacgagaagattctgttaaggcttttaaagcagctaaattcactttacaaggtgaagatggaataggtccagttgataagttaaatgatttgttaaaagaaatttatattgaagctgctcctgaacttgcaaccgacaatctatctaagattgaagagattatcaaagataagaagttatacaagcaagataagttaaaacaagttgcaactttattaactaaagaagcagatacaaaggacaaagcaaagcttaataaagatgttgctaagcaagtagccaatgcctttatgggctacatgattatatttgatactatttttaacttaagtgatgtagatagcaaagattataaagttaaatttagtgatgcaaatattgatgaaaaattagatactctaactagtttattgactgataagcaaactgaatttgttttagaattacaaaatatctacaataccatcgtcttaaatgaaattgttccggatggtaaaagtttgtctgaatcaatggtcaagaaatatgatgaccataaggaagacttgaagttatttaaagcttatcttaactcattaactgatgttaagaaggtaaaagaacttaaagctgcatatgtattatatgtgaataatcgtaaagctaatttattagcagctaagaagttattaggcaaaaaagctgataatatgaataacttcgaaattttcagtaaatttgttgctgataatttagatgattcagaattagcaaacaaaattagagctagacttgatttaggtgaatttttaccaaagcaaagaactaatcaaaatggggtaattccataccaattgcatcaagttgaattaactcaaatccttgaaaaacaaggtaaatattatccattcttgatagcacctaaccctgttgaaagtcatagaaataatgcaccttataggattagtgaacttgtatcattccgtgtgccttattatgttggaccattaattgatccaaataatgctgaatctgaacaagataaggcaaatagttcctttgcttggatggtacgacaaaagcaaggtcaaattacgccttggaactttgaagaaatggttgatacaactgaatcagctaataagtttattaagcgaatgacaaccaaggatacttacttattgggtgaagatgtattgccagcttcaagtttgatttatcaaaaattcgttatcttaaatgaattaaataatattaaggttaatgggattaagttaacgtctgaagagaaacaccaaatttttgatgaactctttaaggtacaaaaatctgttagcttaaagaacttggttaacttcttgactgctcatggttgtgttgctcctaatgtaactggcttgtctgatggaactaagtttaatagtagctattcaacttatattgactatcgtaagatttttggtgctgaaattgataataaagataagcaagcagactttgaaaagatgattgaatggtcaacggtgtttgaagaccggaagattttcaagcgaaagttagaagaaattacttggctaacacctgaccaaattaaacaagtaagtagtaagcgttactcaggatggggaaggttatcaaagaagttattaactcaaattacagatgaaaatggagttaatatcttgcaaagactctggaatgaatctgaaaacttgatgcaaatattatctgatcctgtaattaaagaaaagattgtagctgctaatagttcatttaccaaagctactgacatggaggatatcttggcagaagcatatacttcacctcaaaataaaaaagccattcgccaggtaatgcgagtggttgatgatatcattgctgcagctcatggtaagaaacctagtcaaattgcaatcgaatttgctcgtgaagaccaagataatccccaaatgactaagtcacgtaaggcacaacttgaccaaatttatgccaaaattagtgatgagttcttggataatgctgttaaaaatgaactaaagaatatgaaagataataagcctctggctaaggacaaagtattcttatacttcaaacagatgggtagggatgcttatactggtgaaaaattatctttagataacttgcaagattatgatatcgaccatatctatccgcaatcctttattaaggatgactcatttgataacagagtacttgttcaaagagctgttaataatggtaagtcagataatgtaccagtactcttatttggtaataagcaagctgcagatttaggcatgactattcgccaaatgtggaagaagtggctagaactaggacttattagtaaacgtaagtttaataacttaattactgatccagaaaagatttctagttatatggcttctggatttgtaaatcgtcaacttgttgaaactagtcaagttattaagttagttgcaaatatcttacaagctaagttacctgatactgaaattattgaagtaaaggctagctacaattcaatcttacgtaaggaatttaacttatataagagtcgtgaagttaatgactaccaccatgcaattgatgcttacttaactacaattgtcggtaattacttatatcaagtctatccaaaacttagaccatactttgtatatggacaatttaagaagtttggtaaggctgaaagtaaagaagatgatccagttaagaaaattaagcaattcaactttatttatcaactactctggggcaaagatgacgcaatctgcattagccatactgatcaacaagtatttagtagaagcgatattattaacaaattaactacagcatataatttcaagtatatgaatgtatcacaagaagtttataccaatagtaataatgtgtttaagcagactgtcttcccaattattgaacgcgatactgctaagagtagaagcttaattcctaagaagcttgatcgaccaactgatatttatggtggatatagcaataataatgatgcttacctagctttagttaaagtagataagaagaaaggttcagaataccgtgttgttggtattcctatgagagctgctgcgatgcttaaagcttcaaagaattatgatgaagacttacgcaaagttattgaaccaatggtaatgcttgataagaatggtaaagctaagcgcggaattgaaggattcagagttttagttggtaagatgccgtttaagcaagctgtgcttgatggtgataagaagtttatgctaacaggaactaacgatatgccaaaccttaaacaattagtactgtcacagcaaaatatgaaatatatacttgattatattgatgatattgattgtagaaaacataaatttggtaataaaactcaagatggaaataaatgtttactagaagtatttgatgaaattatacagattgttgataagcattttgaactttttgataatagaagctttagagaaaaattacgtaatagtagagtaaattttatcaacctagcattatctaaaaaagctgaagcgttgttggcaatacttaatggattacatgcgaattcaatgagaacaacaattaaagaattaaaaatttcagatttaggaagaattcaatcgtctgtaatttctccagaagcacaacttatctaccaatcaccaactggattatttgaaagacgagttaaggtaaaagacttataa

SEQ ID NO: 345 - DNA, 4110 bp, Lactobacillus rennini DSM 20253
atggataagccctataatatcggccttgatatcggtagtcattcaattggctggaccgtggtcgatgataacagtaaactggttagaattaaaggtaaattaggttatggcgtgcgcctctttgatgaaggcaaaacagccgaagaaagacgccaattcagaacaacacggcgccgtttaaaacggcgtaaatggcgtttaagattactgcgtgaaatttttgaacctcatatagcaccactggacgaaacatttttccttcgccagaaacaatctaatctagttcccacccaaaaaaagctaccgcaactaagtttatttaacgatcggtcagatgctgaattttaccacaagtatcctaccatttatcatttaagaaacgctttaatgaccgaaaagcggcaatttgatttacgcgaaatttatctggcaatccaccacattgtgaaataccgcggtcattttctaaatgcggcccctgcggcatcttttaaaagtggcaaatttgatttagaaaataagtttgatcagcttaatttgctttttgcgagcgcttatagtgatttagatttcactttaaggactgacaacgttgatcaagttaaagcaatcttactcaacgaagatctcagtgccagtacacggcagcgccaagcattaccactgatttatcaaacatcagctgatcaaaaagcagcaaaaaagctaactaaatcacttgccactgaattattaaaagccattttaggtttaaaagctaaatttgacgtcttaacaggaattgagaccgatgacactaaagcttggcgtttgaccttcaacgctgaagattttgacgataaattaaacgagttaaacgtcaccgacaatgaagcagcaacgcaaatcatcgaaattttacgcgaactttattccagcattttattagctgccattgtgccggaaaattacacgttatcccaagcaatgatggcgaaatacaacgcacacaaacagcacttatcattattgcgacaggttaaaacaaccttgccagcaaaaaagcaaaaagagttgcaagcagcctatgatgactacattgaccagcaccttcccctagataaattctacgcaaaattaactaaagttttaccaaaagaaaaagacactgataatccgcaaattattcaaatattgaatttgattgacttggatcaatttctaccaaaacaacggactaaagacaacggtgcaattcctcatcaattgcaccagcaagaactcgatcaaatcattgacaatcaaaaagcctactatccttggttagcccaattaaatccaaatgaaaaacgccaaaagatagccaagtataaattagatgaattggttgcattcagagtcccttattacgttggccccttaattgaagccaaaacgcaacaaaaaacttccggtgccaactttgcttggatgatccgcaaagaacctggtaccactacccccattaccccttggaactttgatgaaaaagtgaaccgacaagcttcagccaatgaatttatcaaacggatgaccaccacggatacttatctgctaggtgaagatgttttacctaaacatagtctactatatcaacggtttgaagttttaaacgaacttaatggcattaaaatcgatcaaaaacgcgtgactgtacggcaaaaacaagcgattttcaatgatttatttttaaagcaacctaacgttacggttaaaaaattgcagcaatatttacaagctaaaggcgaatacgccagtgcaccaatcatcaccggtttatctgatcctaaaaaattcaacagccaattaagtacttaccatgagtacaaaaaaatttttggcggattaattgacgatcctgataaacaagctgactttgaaaaatgcattgaatggtccaccatttttgaagacagtcaaatccttaaagataaactaaaagaaattaactggctaacccctgaacaacggcacaaagttgccaataaacgttatcaaggctggggtcgactatctaaaaaattattaacacaattggtcgattacaatggtcagcggattatcgatattctttggaatacaactgataattttatgcaaattgtccactcagaggcgtttgataaagcaattatcaaagaaaatcaagctttattgacgcaatacaatccgcaagctgtaattgatgatctgtacacatcaccgcaaaacaaaaaagccttgcgccagattttattagtggttaacgatattcaaaaagcactaaaaggccaagcgccaagtcggattttaattgaatttgcccgagaaggtcaggaaaatccacgcctgtcaacgcaacggaaacaacaagttgaaaacgcgtataaagaagcaagtgatgccttgctcagcagtgcagaagtcagacaagaactcaagggcttagacaataaagctctcgcgaacacccggctcttcctttactttatgcaaggcggccgtgatatttacacaggcaagagcctaaatatcgatgatttatccaaatatgatatcgaccacattttgccgcaagcattcattaaagacaattccttagataaccgcgtgctagtttctgctaaaatgaaccggagtaaatctgatcaagtcccattaaacgactttgcggagattcgctatgggaaacaaatgcggcaacaatgggaaaaaatgctacgggcaggcttaattacgcggaaaaaataccataatttaacactaaatcctgaaagcattaataaatatactgctaaaggtttcatcaaccggcaattagttgaaaccagacaggtgactaaattagccacaaaccttttagtagatcagtatgctgaagacgatgtccaactaattaccgtcaaaagtaatttaacccaccaaatgcgggaagaatttgactttcctaaaaaccggaacgtcaataaccatcaccatgccttcgacgcttacttaactgcttttgtcggactttatttgctaaaacgttatccaaaattagccccttactttgtttatggtgactaccaaaaaggtgccagtcaaaattcaaagtggcgcaattttaactttttaggcaacttacaccgagagaaagtggttgataaaaataccggtgaaattatctggcaacgtgatgctgggttaggtgaactaaatcggatttataactttaaaaagattttggtgacccgcgcactacgcgttaaccgcggtccaatgtttaaacaaaccatctataaggcagaggaagataagtccagcggtcgtggcagtaaacaactaatcccaaccaagaaaaaccggcccactgagttatatggtggctacacgaacaaagaaactgcctacctctgtttagttaaagaaccacacaaaaaaggcgacatttatcgaatttgtagcgttttaaatatgtggctcacagaactagatcggattgctgacccaatcgctaaagcacaaaaattaacagaattattgaccccccaattcacaactaccaaaaagaagcaaggacagaaaattccagtcgttaaaccgtttaaggttgtcattcctaaaattttaattaatcaacgcttctttagtcgtggtcaagaattaaccgttgcttctcccatgtatatgcataatgagcaagaactctttctcaataaaaaaacaattaaattattaaacggtcaattagctaaaaacgaggctcacgagttagcacctaaaatttatcaacaaattttagatcaagtaaatgattattttccactttatgatatgtataaattccgtgacacccttaacgcaagtaaagaaatttttgttaatttaccttggcaagaccaacggcaggacaaaaaaattagccaatctggtcagaaatctatcttaaataaaattctaattggattacatgctaatgctgctcgaattaaattaactgaattaaatttcaaaagtgatttcggtctcttatcacaaagatctggtattgccttctcacctgatgatcaaattatttatcaatcccctactggtttattcgaaagaagggttacgttaaaagatttataa

SEQ ID NO: 346 - DNA, 4086 bp, Lactobacillus rhamnosus GG
atgacaaaattgaaccagccatatgggattgggcttgacattggttccaattcgattggctttgcggttgtggatgcgaatagtcatctcttgcggctgaaaggagaaacagccatcggtgcacggctatttagagaggggcaatcagctgctgaacggcgggaaagtcggacgactcggcggcgtttgagtcgaactcggtggcgcttaagctttttacgcgatttctttgccccgcacattacaaaaattgacccggatttcttcttgcggcaaaagtattccgaaatttcgcccaaagacaaggacaggtttaagtatgaaaagcgtctgtttaatgatcgaacggatgctgaattttacgaggactatccgagtatgtatcacttgcgtctgcatttgatgacgcatacgcataaagccgatccgcgtgagattttcttggcaatccatcatattttgaaaagtcgcgggcattttttgacgcccggtgctgctaaagactttaatacggataaagtcgatttagaagatatttttcctgccttgacagaggcatatgcgcaagtttatcccgatcttgagttaacttttgatttggcaaaggctgatgacttcaaggcaaaattgctagatgaacaagcgacgccgagcgatacccagaaggccttggtgaacttgttattaagcagtgatggtgagaaagaaatcgtcaagaaacgcaaacaagtgctgacagagtttgccaaagcgatcacagggctaaaaaccaagttcaatcttgctttaggtacagaagtagatgaagctgatgcgtcaaattggcaattctcgatggggcagctggacgacaagtggagtaacatcgaaacttccatgaccgatcaaggaacggaaatatttgaacaaattcaagaactttatcgagcacgattgctaaatggcattgtgccagcggggatgagcttatcccaggcaaaagttgctgactatgggcaacataaagaagatcttgagctgtttaaaacctacctcaagaaactaaatgatcacgaattagctaaaacaattcgaggtctttatgatcgatatattaatggcgatgatgctaagccttttttgagggaagactttgttaaagccttaaccaaagaagtaaccgcacacccaaatgaagtgtcggagcagctgttgaatcgaatgggacaggcaaacttcatgctcaaacaacgaactaaggccaatggtgcgattcctgtccaactgcaacaacgtgaactagaccagattattgctaatcaatccaaatactacgactggcttgccaaaccgaatccggtagagaagcatcgcgctagcaaaccttatcagctagatgaactgttaactttccgaatcccttactatgtaggaccactgatcacgccaaaagaacaggccgagtcaagagaaaatgtctttgcatggatgatccgtaaagatccttcaggcaatattaccccttacaattttgatgaaaaagtcgactgtccagcttcggcaaacatgtttatccaacgcatgaaaaacaccgatacttatttgattggcgaagatgtcttacctaaacgaagcctgttatatcaaaagtatgaagttttgaatgagttaaacaacgtcagcattgatggtaggaggcttggcgcagatcaaaaacaacgcttgatccgcgaagtgttcgagcgacatagcagcgtgaccattaaacaagtcgccgaaaatctagttgctcatggagattttgccaaacgcccagagattcgtgggctggcagatgagaaacgcttcttaagttcgctttcaacctatcatcaattgaaaaagatcttacatgaggcaattgatgatccgaccaaagagcatgatatcgaaaatattattacgtggtcgacagtttttgaagatgccgcaattttcaagaccgagctggctaaaattagttggttggattcagatacaatcaaggcattaagcaacatccgttatcgtggctggggtcagttctcgcgcaagcttttagatgggttgaaactaggcaatggccacaccgtaattcaggaattaatgctttcgaatcataacttaatgcaaattttgaccgatgaaacgttgaaaacaacgatggcggaattaaatcaagacaaactgaaggcagacgacattgaagatgtcattaatgatgcatatacttcgccaagcaataaaaaagctttgcgtcaagtgttacgggttgttgaagacatcaagcatgcagcaaacggtcaagatccaagttggctttatattgaaacggcagacggaccaggcactgccggtaaacgcacccagtcacggcaaaagcaaattcaaacagtttacgctaatgctgcccaagagctgattgatagtgctgttcgtggtgaattggaggataaaattgctgacaaggccagctttaccgatcggctagttctttacttcatgcaaggcgggcgggatatttataccggcgcaccgctgaatatcgatcaactcagccattatgacatcgatcacatactgccacaatcgttgatcaaggatgactctttagataaccgtgtgctcgttaacgccaccattaaccgcgaaaagaacaatgtatttgcttcaactttgtttgcaagcaagatggcagcaacttggcgtaagtggcacgaagccggtctaatcagtgggcgtaaactcagaaacttgatgctgcgtcctgatgagatcgataagtttgcgcacggatttgtcgcgcgtcaattggttgagacacgtcagatcattaaattaaccgaacagattgccgcggcgcaatatcccaacaccaagatcatcgcggtcaaagctggcttatcacatcaactgcgcgaagaactagactttccaaagaatcgtgatgtgaaccactaccaccacgcatttgatgccttcttagcagcgcggatcggcacgtatctgcttaagcggtatccgaaattggcgccatttttcacgtatggcgaatttgcaaaggtcgatgttaagaagttccgcgaattcaacttcattggtgcactaacacatgctaagaagaatattgtcgctaaagataccggcgagattgtttgggataaagaacgtgatatccaagagttggatcggatatataacttcaagaggatgttgataacgcacgaggtttactttgaaacagctgatttgttcaagcagacaatttatgctgccaaggattcgaaagaacgtggcggaagtaagcagctgattcctaagaagcagggttatccgactcaggtttatgggggttatacacgggaaaatacggcttatttggcggtggttaaaactgttgaaaagaaagcagatgtctatagagttgtcagaattgcaacttctcaagtagcggcattgaaagaagctagagcgcaatcgactgtcaaagaacgagaattattaaagaagtttttgacaacaaaattcacaaaaatcgggaagaacggtaaaaaagcaataacgccatttgatatcgttattccacgagtaccacgcgaacaactctttcataataaacgttatggctttttcatggttaattccgatacgctgatgcataactatcaggaactgtggatgtcacgctccgatcagcaaattttgtcaaaacttgtaaagtctgcgaaaactgtggaaaatggccaagtcggcaggctgtttgaaaatatagtggaacagattaataagtattttcctctgtatgatattaatcaattccgaaaaaagcttgatcaaagcaaagatatattttcaaaattaccattggaaggaaatggtacaacctcagggaagagagaaaccattcagaatattctaactggagcaggaactggtgcaaagaatggtgacttgaagaacttgggcataaaaacaccttttggttttttgcaagttccaagtggtattgtgctggatgacgacaccacattgatttatcaatctccaacaggaatgcttaacagaattgttcgattaagcgaactataa

SEQ ID NO: 347 - DNA, 4137 bp, Lactobacillus rossiae DSM 15814
atgaaaacgtttgcggaggaatacgtgatggataaatcaaaaccatatggaattggcctagatattggtacaaattctgtcgggttcgtggcgactgatgctgaggggcaccttatccgattgaaaggaaagacggttattggagcgtacctgtttaatgctggaatatcggcagcggaaagacgggggtttcggacgacaagacgtcgattatcgcgggttaaatggcgcctaggacttcttagagaaatatttgagactcattttcaggaaagtatgggagaaaatgaggataatgatttctttttacgtttcaaatactcgaatatttcacctaaagacccacaattttcgacggctaagggtttatttaatgatcgaacggataaggaattttatgatcagtatccgactatttatcatttgcgtcgggctttgatgactgaagaccatcagtttgatattcgggaaatatacatcgcaatgcatcacattgtgaaatatcgtggtcattttttaaaagaaggacgcgccaaagactttaaagttggggatttaagactgctggataatttcaaaatgatgaatgaacaaattgaagaaattaatcctttgtggcagttgaaattaccaactgatgacgcctctattaagtcgataaccgctattttactagacaatactcagagccaaaatgatcgtcaaaaagcagtgacgaaagtaattctggcaacacttgttaaggcgagtgacaaagacattaacgctgcacgtaaacggtttgttggcgaattgagtaaggctatggttggccttaaaacaaaactttgggttcttgcagatgtttcgcagaatggtgattgggaaattaagtatgaaaactacgctgactttgcggaaacgatcggttccggtgaaagtgacaccattcaaagtctttttaacgagattaatgatctatatggggttattacgttggctggcattattcccaaagaagctgagtcattttctgacggaatggtccgcaagtatgaacatcatcgtaaaaatctagaactgttaaaagtttattgtgcggaacaatcagatggtaaacggggacgacagattcgtcagacttatgataaatatattgatggggtagatagcaaacagtttacgcaggaagacttttataaggcattaagcaagttcactgcgaaggatgaagcgactagtgaaaatgccaaattaattgctcaggaaattgcagttggaactttcatgcctaagctgcgaacaaaggctaatggcaccattccacatcagttgcaccaaaaagaattggatgcaattattgaaaatcaaaaaaagtattacccatggcttggtgaagtcaatcccgttgagagtcatcgtcgcgcattgccatacaaattggatgaattagtcagttttaggattccatattatgttggaccaatggttacgccaacaaagggagatccagaaaaaagtaaatttgcctggatggttcgaaaggaaccgggtaccattacgccatggaatttcgatcaaaaagtagaccgatcggcgtctggtgaagcgtttattcaacgaatgaaaacgactgatacatttttaattggcgaagatgtattgccacaacaaagtctgctgtatcagaaatttgaagtactaaatgaattaaacaaaattatgataaacggtaagccaatttgcagagaacagaaacaacggcttttcaaacaactgtttatgcaatataagactgtgacagtgaagaaagttcaacaaaatttaattgcgaatggtgaagagtctgaaaatgtgccaattactggcttgtcagatcctttacggtttaatagttcattcagcacttatatcgattacaaagatattttgggtacagctgctgttaacgataatgcaaagcaaagcgatattgagcagataattgcatggtccacaatttttgaagatgcagccattttccgagagaagttaaatgatattacttggcttaatgacgatcaacgcaataagctcagtcataaacgttatcgcggttggggtcgtcattctcgcaaattgttagctggtcttcgtgacggagaaggccagactatcatcgaacggctatggaacacaaatgacaacttcatgcagattcaaaacgatagtgaaatagcgcgtcaaattaccgaagcaaactcaagcaagatggcaaccgctgagggaacagacgaaattatcgatggcttctacacttcacccgaaaacaaaaaggccctgcgtgaagtaatgaaagttgtgaaggatattcaacgtgcgcatcatggtcaggcacctgcttgggtttatattgaaagtccgcgagagacaccaagacccggtcagcggacagttagtcgagaacaacagttaacagatttgtatgagggtgcagcaaaagaaatcgttgatgatgccgttttaaatgaactaaaggacaaggttaaatccaaggaaaactttacggataaattagttttgtatttcttgcaaaatggacatgatatttatgcgaatgacagtatcaacattgataaccttaatgcatatgatatcgatcatgttttaccgcaaagtttgataaaagatgatagcctagacaatcgggttctcacaacacatgaaagaaatcttaaaaaatctaatcggtttgctacagaactgtttgccgatcaaaggaaaaaatgggaaaaatggcatcgattaggattgatttcgtcacgtaaattaaaacatttaactatgcagcccaattcagtagaaaaatttgcacatggatttattgcacgtcaactcactgaaacgaggcaaataattcatttaacggcgaatgtactttcaaatttatatcaagaaaatgacactaaaatcgttatgattaaggcgggattaaactcggagtttaggcgtacatttgattttccaaagaatcgtagtgtaaatgattaccaccatgcctttgatgcatttttaacggccaaaattggacgttacttattagcgagatatccaaaattagaacccttttttgtttatggaaacttcgttaagaatcctaaagcaatgaagcgattgagtagttttgatttcattgctcagttagctgctaaaactgatgatactagtcatatagatcaacgcagtttaaaacaagttcccgttgttaatgaagaaacaggggaaattgtttgggataaggatattgagcttgctgaactggacaagacgtataactacaaaactatgttagtgaaacgtgctcagactgaaaataatgctcaaatgttcaaacaaacagtttttaaggctcgtgacaatcaaaataaaacgctaattcctgtcaaaaatggattatctactgacgtttatggtggtcattcacaacaggcgatttcttacttatgtatcgtttgggttggacaaaagaaaaaatatcgcgttttgggaattagtaccgcccatgcaggcatattgaacaatttcgaaaaaaactacggccggtttgaagcgaaaaagaaactacaagaaattgtctccaatacactagataatgcggacagaaacgattttaagatagttgctcctaaagttttgtttgaacaagtggttgaggacgataacatgaagtttgggttgggtagtgctagtgactatagaaatgttcaacagttgtttttatcccggaaaaatcagttgctattggctaatatgatgactgaccaaatacacgaccaagatttagtccacctttttgacgaaatagttggtcaaatgaatgcgcattttcccatttttgatcgcggaggctatcgaagttcattgacccaatctcgtgataaatttttgaaattaccttttaaaaagaatgaggatttgatcacgaaacaagaggttattcgaagaattttagatggattacatgctaatgcaaatcgtaaagatcttaaaatcattggtagtaaaggtgattttgggagattgggaacaaagaaaatctacttatcgaaagatgcgaagcttatttacacctcaccaacatgtctttttactcgtactgttccactcagttctttgtaa

SEQ ID NO: 348 - DNA, 4128 bp, Lactobacillus ruminis ATCC 25644
atgagaaaaaaccaagaaccgtacaacataggcttggatattggcactagctccattggatggtcaataatgaatgataattttgatctgatgagagtcaagggcaaaaaaggtatcggggtacgattgtataacgaaggacagtctgctgctgaaagaagaatgcatcggactgccagacgtcgatatggacgaagaaaatggcgtctaaggttgttggaagatttttttgatgaacatatggccgaagtagacgacactttttttgcaagacttaaagattccaacatatctccaaaggatgataaaaaatatcggaaatcattgctttttccaaagtcaaaaggcgtcacgtaccaagatgatggcgagttttacaaaaaatatccgacaatgtaccatctgcgctatgcactgatgactgagcatcgaaaatttgatcttagggaaatatacttggcgtttcaccatatggtcaaatatcgcggtaatttcttatatgataccagcgttgattcttttgaagcaaagaaccttgatattaagggaaaatttgatgagattaatgatttgctctcgagttatacggatttttacgttgataacagcaatgcagcgctagttgaatcaattttgttggaaaaaaatacgaccagaaaagataagtcaaaaaagattgccaaacttcttcacgtagaagacaaagaaaagggcaagaataaaaaggccaaagatttggcaactcaaatctctaatgctgttttgggtttgaaatgcaattttcatctgatttttgaattgcaacagaagtattcttttgatttgtgttcggaaaaaacggaagaaaatatcgcaaaattgtcagaagtgcttgatgaaaatcaaaagatgttactgatgattttgaaagaggttcaagatcaagtaatgctgaatgcattcgttccgtcgggaatgagtttatctgaggcaatgatgcaaaagtatgatgactatggtgagcagttgaaaatataccacgagctcgaacatagcgtttctgatgattcagcagccaaattacgtggtgcgtatcgtgattataatgacaatataataaaaagaattgacggcgataataaaaaggacactttttacaagagagtcaaaaacatattaactaaaatatcaaaagaatacgttgatcaagatgtgttagagtcttgcggcaagttaaagaaactcatagacgaaaacaagctttttatcagacagcgaacggcagcaaatggtgttttgccgcatcaactgcatcaaatagagatgcgtaaaattattgataatcaaaaagagtattacccttggcttgctgagccgaacccgaacgaaaagagaagggtctactcgaagtacaaagttgaggagttgattgctttcagaattccgtattatgttggaccgttagttgatcccaacaacgctgacaaaaacaaagaagcacgtttttcttggatggttcgcaaaaaggacggcgaaattactccatggaatttctatgataaagttgactgggcagagtccgctaacaattttatagaacggatgaagagcaaggatacttatcttcttggtgaagatgttgttccaaaagaaagcatgctttatcaaaaatatgaagttctgaatgagctgaataatttaagaattaatgacagtgggttaagtgattcgtttgaagatgtcaagttaaaacaagcaatctataatgatttatttaaaaaacaaaaaattgttaaaatcacagatttacaaaattatcttgttcaaaatcataaatatttggtcaaaccaaaaatcagcggattggccgatgaaaatcgtttcttatcatctttgagcacatacagcgatttaaaaacaatttttggtgacaaagttgatgacaggacatattttaacgattttgaaaaaatggtggaatactctaccgtatttgaagacggccatgattataatcaaaagcttgatgaatatacctggcttactaaagaagaaaagtacaaaattggaaagaaacgttatcgtggttggggaaagttgtccaaaaagttgttaacaggtttgcgcgacaaaaataatcatacgataatggataatctgtgggaaaccaatcgaaactttatgcagattcaaacagcagatgaattttcaaaacaaattgctgaagaaaacgaaaggcatttgaaaggaagcgttagtgacgcaataaatgacatgtatacgtctccggccaataaaaaagcaatcaggcaagttttaagggtggtcgacgatatacaaaaagcaatgggatacgcaccatcttcaatttcattggaatttgctcgtgaagacgggccgtccgtaaggacagtgtcgagagcgaacagaatgaagtccatatatgaaaagtacgcttctgaagttagcgaagaagtgatgaaggatttggacggcgtgatcaaggataagaaaggcttgaatgacaggttatatctttattttgaacaacaaggaaaagatatgtattctggtcatccgcttgatttcgacaaagtaatcagtggtcaagaatatgatattgatcatattttgcctcaagctgtcattaaggatgattcgcttgataatcgtgttttgacgactaaagcactcaataacgatgttaagtcgaagggtgttccgtgcagaatgtttaatgggatgcatagtttttggaagaatttgtatgacaaagggtttatttctcgtaggaaattcaataatttgacaactaatcctgaaaatattgataagtataagatgaaggggtttgtaaatcgccaactagttgaaacgcggcaaattatcaagcttgttgccaacgttttaaacgataaatatcaaaatgacgatgttgacattattgaggtaagggctgaacttacgcatgatgtcagaaagcatttcaaattctataaaaacaggaatgtaaatgattatcatcatgctttcgacgcttatttgacgagctttattggtcattaccttttcaaaaagtatccaaatctcaggccgttatttgattataatgattttatgaaggtgtcggataacgtatttaagcaacttcgcggaaataatttcttaggtgagtttttgaataaaactggtgatatcatcagtactgatggaaatttcgttctcaataaagaagaaatgattaataagctgaataaggcttatgcgtttaagaagatactggttacaaaagaagtgggacagcgtacgggagctatgtttaatgaaactagatacccggcgcctaacagtagaaaagctgctctcaaatatagaagaatgccaaagcctgactcattaataagcgtaaaagattacaaaaatacagatatatatggtggttatagcggtaaaaatgatgcatatatggttattgtcgatatgggcaagcaatatatggttgttggtgttcctgttcgatatacggaaaaacttgataaactgcgtatcaagcattctgaattgtatagggatgaattacgcaaagttctttcgagggacaagacgctattggattctaagggaaatgttaagcgatttgatatcgttctagatagagttctttatggtcagcttattgaagatggaaatgagttatttactttgggaagctcaaagtataagcgtaatttcagacaattgtttttagataaacaatgtatagaaattcttgattcgagtgcaactccgcaacctactgatgaggagcttatatgggtatatgatcaaatattggataaggttgataaatactttgaactctatgatattaatagacaaagggaaacgttgagaaagggaagagcggcattttgctcattgcctaatattagtatgaaaaaggatgatgtaacaaaaaagaaaatattaaatgaaatattagttgcattgcatgcaaatgaaagtgaatctaactgcgaaaaaattggaaagaaggtttttgggagattgcaagtcccaggcggaattaaattatccaaggaagccaaacttatctatcaatcaccaacaggtctatttgaacgagtcgtatatttgaaagatctataa

SEQ ID NO: 349 - DNA, 4110 bp, Lactobacillus sakei carnosus DSM 15831
atggcgaaaacatataatatcggactagatattggtacaaattcaattgggtgggcagtcgttgatgaccagaaccacttaatgagtattaaaggaaagtacggttatggtgttcgattatatgatgaaggaaaaacagccgaagaacgtcggagttttcgaacaacacgtcgtagattaaaacggcgtaaatggcgattgagtttattaagagaaatttttgaaccacaaatcacgccgcttgataacacatttttcttacgtcagaaacaatcaagtctaagctcaaaggataatcgtaaattatatccagaaatgagtctttttaatgatcgaacggatactgatttttatacacaatatccaacaatttatcatctgagccgcgatttaatgactaagaataagcaatttgatattagagaaatttatttagcaatgtatcatattgtgaaatatcggggacattttttgaatgaatcaccggtatcatcatttaaaagtagtgaaattaaattagctgaaaattttgaaactttaaaccaaatatttaacgaacgatttaatgaatccatgttccaattagctgtaaatgattttgatgatttgaaagcattattgctaaatgaccaacaaagtgctagtaatcgacagaaaaaagcattgggaatgatttatgttccaaacgaaaacaaatcacttgagaagcaaaataaggcaattgccactgagttattaaaagcgattctaggcttaaaagcaaaatttaacgtcctaaccggaattgaagtcgatgacgcgaagccatggacattatcatttaactctgaaagtttcgatgaagatattgataaggcagcaaccaatattgatgatgacagccgggaaataatagcaatcttacagggcctttattcgggtatcttattagcaggtattatacctgaaaatcaatcattatcggaagcgatggtcgaaaaatatgaccagcatgctgctcatttaaagcaattaaagtcaatctacccactgttgagtatttctgataaaaaagcaattcaacaggcctacaattattatattgatgggcaagataatgctaaagcttacagcagagaagatttttatgcagcaactactaaagcattgaaatcatatcaggataacgaaacgattgctgaaattctaaagttaatcgaacttgaacaatttatgccaaagcaacgaacaaaagataatggtgcaatcccacatcagttgcaccaacaagagctagagcggattattgaaaaccaacaaaaatattatccttggttggcagaacttaatcctaacgaaagtcggcgtaaaattgctaagtataaattggatgagttagtggcatttagagtgccttattatgttgggccattgatcacgtctgaacagcaacaacaaagttcgaataaaaaatttgcgtggatgattcgaaaagcagagggtaagattacaccgtggaattttgatgaaaaagtggatcgacaagcatcggcaaatgaatttattaaacggatgacaaccactgacacctatttattggcagaagatgttttacctaaacaaagtttggtatatcaacgatttgaagtgctaaacgaattaaacggtattaagattgatgatgtaccgattacagttgaacaaaagcaacggatttttaacgatttgttcatgatgcaagcaagtgtttcggttaaaaatattcaagattatttggtttcgaagggttattttgctagtcggcctgaaattacgggattatctgatgaaaataaggttatcagtaggttgagtacgtaccatgatttgaaggcaatcttgggcggaattgttgatgaagccaacaaacaagctgatctagaaaaatgtgttgaatggtcaacaatttttgaagatggtaaaatttttgtcgaaaaattaaatgaaattgaatggttaacagatgaacagcggaaacgattatcttctaaacgttatcggggatggggccgtctttccaataaattattaaatcagattgttaatgaaaacggtcagagaataatggatttattgtgggatacgacagacaattttatgcggattgttcattcagaggaattcgataaattaattagtgctgctaaccaaacgttattatccaaaaatgatgttcaagatgtgattaatgatttatatacgtcacctcagaataaaaaggcattacgccaaattctattagtggtatctgatattcaaaaagcaatgaagaatcaagcgccaagtaaaattctaattgagtttgcccgtgaggatgaggcaaatccacgtttatctgttcagcggaaacggcaagtcgagcaagtttatcaaaatattagtaaggatatccttagtgattctgatgttaaggcggaattaaaggatttaactaacacagcattagcaaatacgcgattattcttgtactttatgcagggtggtcatgatatgtatactggagaaactttaaatattgatcgcttatcagaatatgatattgatcatattttaccgcaagccttcattaaagataattctttagataatcgggttttggtatctgcaaaaatgaatcggagcaaatctgatcaagtaccgttaaatgactatactgaagaacgatttggctcaaaaatgcgtgttcaatgggaacaaatgttacgagcaggattaataactaaacgaaaatatgataatttaacgttaaatcccgatcgaattagtaaatatgctatgaaggggtttatcaatcgacaattggttgaaacacgacaagtgattaagttagtaactaacttattaatggatcattatgaagatgatgaggtccagttgattacagttaaaagtggtttgatacatcaaatgcgtgagatgtttgattttcctaaaaatagaaatttaaataaccatcaccatgcatttgatgcttatttaacggcttttgtgggaatctatcttcttaaacgttaccctaaattaacgccattttttgtttatggaagctatcaaaagaataataccaatgataagtggcgtaattttaatttccttaacgatttaaaaaaggaagaagtaatagattcagattctcacgaggttatctggaataaagcgcaaggacttgttgagttggataaaatttatcaatttaagaaaatcttagtgacccgtgaagtccatgaaaatacaggtgcactatacaaccaaacgctgtattctgctaaagacgataaggctagcggtcaaggtggtaaacagttgattcctgccaagcaggaccggccaactgcattatacggtggttactcgggcaagacggttgcttatatgtgtattgtccggattaagtctaagaaagaagatacgtataaggtttgtggtgttaagacgagttgggtggcagaattggagagactatctgattctaatgaacaattagctagtcttaaggcaaaattgatgcctaaatttacgaagaataaaaaacaaaaaggaaaaacaattcaagttaccgaagattttgaaatcattgttcctagggtattaattaatcaacggttttatgataatggacaagaaataactctaggatcagcaacttataagcataatgaacaagaattaatgctaaataaaaaggcagttaaactattgaatggtcaattatcgttagttgaggccgaaacattagcaccgcaagtttatgatgagattttaaaacaagtgatgaaatacttcccactgtatgataccaatcaatttagaacaaagttgaagatgggtaaggaacaattcatcaaattaccgtggaagaataaatgggacggtaataaattgattcatgtgggccaacaaacagtattagatcgcattttaattggattgcatgcaaatgcagcggtgagtgacttaagtaccttaaaggtaacaacaccatttggtaaattacaacaaccatctggaatagcactttccctaaatacgaaaattatctatcaatctccaactggcttatttgaacgacgagttgctttaaggggtttataa

SEQ ID NO: 350 - DNA, 3450 bp, Lactobacillus salivarius UCC 118
atggaaagatatcacattggcctagatatagggacttcgtctataggatgggcagtaataggcgatgatttcaaaattaagagaaagaaaggaaagaatttaataggggttcgtttatttaaagaaggagataccgccgcagaacgtcgaggtttcagaactcaaagaagacgacttaacagaagaaaatggcgattgaaattattagaggaaatttttgatccgtacatggcagaggtagataaatatttttttgccagattaaaagaatcaaatctttccccaaaagacagtaataagaaatatttaggttcattattattcccagatatatctgattcaaatttctatgataagtatccaacaatttatcatttacgaagagatttaatggaaaaagataagaagtttgatttaagagaaatctatttagcaattcaccatattgtcaagtatcgtggcaattttttagaaaaagttcctgcaaaaaactataaaaatagtggagcatcaattggatttcttttagaagaggttaacgatttatacggtaacatcatcggtaatgaagacgttgccattcttgataatgataagtttgaagatgtagaaaagataatcttaaatgatgaaattagaaatattgataaacaaaaaaatgtaggaagactattagtaaaagataaaaaggaaaagaatatagttactgcattttctaaggctatttttggatataaatttaatcttgaagatttattgttgatagaaagtgatgaaaagaataaattaacatttaatgatgaaaatattgatgacatttttaatgaattatcacattccctaaatgataaccaaatggatttactaactaagactagggaaatctactttaagttcaaattaaatatgattgttccaactggatatacaatatctgaatccatgatagaaaagtacgagatgcacaaagctcatttaaaaatgtacaaggaatttatcaatactctaaatgcaaaagatagaaagatcttaaagaatgcttacagtgactatattaataatgaaaaagctaaagctgctaacgctcaggaaaatttctataaaactgtaaagaagactattaaagaaaatgattcagatacggctaaaaagattataggcttaattgatgaaggaaattttatgcctaagcaaagaaccggtgaaaatggtgtaatccctcatcagttacatcaaatagagttagatagaattattgaaaatcaagccaaatattatccatggttggcagaagaaaatcctgtagaaaagaatagaaaattcgctaaatataaattggatgagctagttacttttagagtgccatactatgttggaccactgatagataagacagagtctaataaaaatgaaaaagaaacaaaatttgcatggatggttcgaaaagcaaaaggaacaataactccatggaatttcgaaaatttggttgatagaacagaatcagctaatcgttttattaaacgcatgacttccaaagatacatatataattggtgaagatgtattgcctgcttctagtttgctatacgagaaatataaagtacttaatgaattgaataatattaaagtaaataaaaagaagttagatgttgaacagaaacagcatgtttatttagatttgtttacaactagaaagaatgtaacaaaagatgatctagcaacttccctaaattgtgatgtagaaagtattactggactaaccgataacaaaaagtttaattcttcactgtcaagttatattgatttaaaagcgatattaggaaatatagtagatgattacagtaaaaacgaagatttagaaaaaattattgaatattcaactatttttgaagatggtaatatctacaaagaaaaattaagtgaaatatcatggttgactgatgagcagattgaaaaattatcaaatattcatttcaaaggatggggaagattatcaaagaaattactaacacagattactaatgagaatggtgaaagaattattgatacattgtggaatacatctaataattttatacaagttataagtgatgaaagtattcaagcaaaattagctgaaattaacggtgagtatgcgaataaatataacttagaagatatattagatgaggcatatacatctccacagaacaaaaaagccattagacaagtaatgaaagttgttgaagatattgaaaaagcaatgaagtgtgagccaacatctatagctattgaatttactagggaaaaacgaaagagtaaattaacgaatactcgttataagaaaatatctgaaacttatgagaaaattacagatgaactaatctccgaatatgaattaggaaaattacaatcagaattagatagtaaagtcaataatatgagagatagatattatttatactttatgcagttaggtagagatatgtatactggtgagaaaatgaatattgatgaattgcaccaaaaatatgatattgatcacattcttccacaatcctttataaaagatgattcgcttaataacagagtgttaactagtaaaagcgtgaatattaaagaaaagtcagacaagacagctgcagatttgtatgcagcgaagatgggtgatttttggcgtaaactacgtaaacaaggtttaatgacggagcaaaaatataaaaatttattaactaggacagacagtataaacaaatatactaagcaaagtttcattaagcgtcaattagtagaaacaagtcaagtggtaaaattggctgctaatatattgcaagataaatatcgtaatacaaagattattgaaataagggcaagattaaatagtgatttaagaaaaaaatatgagctgataaaaaatcgagaagttaacgattatcatcatgctatagatggatatttaacaacctttgttggacaatatctgtataaagtatatcctaaattacgcagttattttgtatatgatgattttaagaagctagatagtaattacttgaaacatatggataagtttaactttatatggaaattagaagataaaaaagcagaagatgtctacgataaggtaaatgatgaattcgttttaaatgtgccagagatgaaagaatatatacgaaaaatttataattataaatatatgttagtttcaaaagaagtaactactaaaaatggtgcattttatgatcagacaaaatataatgctaagacgattaacttgattccaataaagaaagataaacctacaaacatttatgggggctacaaggggaaagtaagtagctacatgatgctagttaagattcaaaagaagaaagaagtaatatataaatttgtaggtgtaccaagactttggactgacgaattagatagattaattgatactgatgaaaagaaagcattattgaaaaaatag

SEQ ID NO: 351 - DNA, 3996 bp, Lactobacillus sanfranciscensis DSM 20451
atgaataaacaaccatataatattggactagatattggaacgagttcagttgggtggtcagccactgaactggataatcgtttattacatattaagggacacaacggaatcggagttcgtttatttaaagaaggagaatcggcagctgatcgtcgtggctttagaacaactagaagacgattagctcgtcgaaaatggcggcttcggttgttaaacgaaatttttgctactgaaattgcaaaagttgatccaagtttctttgccagattaaaacaatcaaacgtttcgcccaaagatccaaataaaacaatgtttgagaatatcttatttgatgacgaaaatttagatgatcaaaaatttcatcatgattacaaaacaatttatcatttgcggcaagcaattattaatcatccagaacaaaaatttgacattagattaatttacttagccatgcaccatattattaaatatcgtggtcattttttgaatcaagcaaatgtgcaagattttaaaggtggaaaaattgatttagaaaaatcttttaaagcgttgaatgacatctttgaaaatcaaggacgtgatttacggcttgtgactgataaggctaatcaatatgtaaaagtacttagtgataacgccaaaactagatctgatcggaaaaaagaattatcgaagttattgtatgttccaattgataaagatactgataagaatagtaagaaagttacgggagaaatcctcaaggctattttaggtaataaagctaaatttgatgtgatttttggcattgaggtggaaaatcctaaagaatgggtcttaactttcaatagtgatgattttgacgataaaattgaaggtttatcatcccaaatgacggatgaagattctgaaattcttttaattttgaaagaactttattttgctttgaacttatctgatattttaaataactcagttactgataaaaatgcaaaaactttatcagaagcgatgattaaccgttacgatgatcataaaaatcaattagcaatgttgaaaaaagtaattgatagttctgataagaaacatgcaaaggaattaaaagaagcttattcagcatatattgatggggaaaataataaaaagatttcttttgaagatttaaagaaacgaattcaaaagaacttagttgattcagaattatcacaaaaaattaatgatttattagatcatgattactttttacctaaacaacgttctaaagagaacggtgccatcccacatcaattacaacaacaagaattagatcaaatcattgaaagtcaaaaacaatactaccctttcttagcagaattaaacccgaacgaaaaacgaagtcgtcaagctaagtataaacttgatgagttagttgctttccgagttccttattacgttgggccgatggttgaagttaccgatagtaatcaagaaaataatggtaagtttgcttggatgattagaaaagaacaaggtgaaattaccccttggaattttgacgaaaaagttgatcggactgaaactgctaccaaattcattactagaatgactacgaccgatacttatttaattggtgaaccagtgcttcctaaaaatagtttgttataccaaaaatttgtagtcttaaatgaattaaacaatttaaaaatcaatcaagaaataattacgcctggacaaaagcaatatctttatgaacatgtaatgaagaaaaacaagcgggtgaccttgaaaaagattgcagatgccttagtaattaaaggtgactatccttacgctccagaagttaagggaacaactgaccaaaagaatttaaataacggattaacgacttatatcgatttagccaaaatttttggtaatgaattagatgatgttgatcgagaagcagactttgaaaaaatcatcgagtggtcaacgatttttgaggatcaacatatatttgccttaaaacttcaagagcttaaatggcttacggaaaaacaacgtaatcaagttgttaaacttcgataccaaggttggggtaaattatctaaagaattacttgctggtttagttgatgataatgggcaacgaattattgatcttttgtggagcgataatcaaaactttatgcaaatcgtaaaccaaaaatcatttaaagaatcaattgctgatcataatggtgctcacttagaagagaaaaatttaaaagatgttatcaatgatttatatacttcacctcaaaataaaaaagccattcgtcaggttattttagtggtcgatgacattattaatgcagttggttatgaaccagctaatattatgatggagtttgcccgtgaagattctaacgaccatcgcttaactaattctagaagtcgacaattagaaaatgtttataaggatattactaatagttggtttgacaatgatagtgttaaagatgaactagaggacaaaattaaaaataaagataagtttacagaccgcttgtatctatactttacacaaggcggaaaagatttatatactggtgaaccattaaatattgatgatttatctagttatgacattgatcacattttgcctcaatcatttattttagataattcgttagataatcgggtccttacttctcaaagaaataatcgggtttcaaaagaagatcaattgccaggtgaattattcggtactaagatgcacgcattttggaaacgattaaaagcagctcatttaattagcaataaaaaatactataatttaacgcttacacctaattcaattagtaaatttaataatcaaggacgttttattaatcgtcagctagttgaaacgagacaagtaattaaattagctgctgaaatacttcataatcgttattctgaagaaaaaggaactaacattgtgacaattaaagcaaatttaactcatcacatgcgggaaaaattcaatttctataagaaccgaaatgttaatgattatcatcatgcctttgatgcatatttaacggcttttgtgggaaactggctattacaacaatatcctaaattgaaaccttattttgtatacggtgattttgctaaaactgaaattaataatttgaagtcatttaacatgctttataaatttgaacaagctcaccaattgaatgaaaaagatgggaagattgctaaagatgcggatgccttattaggttatatgaaaaatgtctatcactttaagaagatgttggttactaagaaattggaaactaatcatggggctttatttaaacaaactttgtacccatcaccagctcatgatattaaaaaacggcaattaataaaaccaaaggataatcggccaacagatatatatggtggttatacacatgaagaaagaaaatatatgtctttagttaaagtgattgggaaaaaagataacgaatatagaatggcgaatgtaccacttttaaaaattaataagaataatgatattaaagaaattttaaaatcacaattttctaataagaaattcgaaattgttttacctaaagttttaaaaaatcaattatttagtgaaaatggtgcattatttgtgattggcagtaaaggatataaatataatgctaatcaacttgttttatctgatcttgatatgaaacttttaaatgatttaagtaacaataaatctattgatgaagttactatcaatcaattatttaaaaatattgttgatagtactaataaatatatgccattatatgaaattaaaaatttaaatgaagtagttgaaaaattcaataatctagaatttaatgataagaagaaaacgataactgatttcttactggcaactcatgctaatcctactatgagtaatttgaaaaatattggattgccatcttactttggtagatttacaagtggaaatgctggaattaaattaagtgaaaatgcaaatgtaatttaccaatcaccaactggattattttcacgaaaagttaaaatttctgatttttaa

SEQ ID NO: 352 - DNA, 4041 bp, Lactobacillus saniviri DSM 24301
atggttgaacattatgcgattgggtttgatattgggacaggctcgacaggatttgccggtgttgaccctaatggtaagcttgtgcgaatgcgcggcaagaatgtttacggggtttatcgcttcaagggtggcgaagcagctgcggatcgacgtggttttcggacgacacggcggcgaatcaagcggcgcaaatggcgcttgcggtttttaaagagtttttttgagccctacatagcaccaattgatccagaattctttttacggcagaagtattcagctgattcgccattggatccaaaggggatccgagcggataagggccttttgtcagacatgagtgatcaagagtttcatgcgaaatatccaacgatttatcacctgcgctaccagttgatgcacgagaagcgacaatttgatgtccgcgaaatttatctggcgatgcatcatatcatcaaatatcggggtcactttttaatcgaagatggcgcggacaactttgacgctaaacaaatcgatttctttgatcaattccaacgaatggctgcggtgacggcgggcttgcctgaattagaaactttggtcgtgccagatgagacacaatcagatgcatttaagcgcgtcttgtttgacgaatcacagaccaagtctgatcggcaaaaagtattggccagtcaactgctggatattcaagataatcagagtaaggcgattaaggactttattgcagcactaactaaggctgtggtgggcatgaaggctaacttagcgacattgacatcaacagctattgagagtactgacaagaatgactggaccaaaccgcttggccagctcgatgatttcttactcaagcatgaagaagatcttgatgaggatgggtatgcactgattgatgcggctaatcagatgtattcggctgctgtattagccgcgcttgttcctgaaggcatgggtttctctgaggcaatgatggcgcgttatgcgcaacataagaaacaattagcgttgtataaacaagttattgccagtttgcctgataagacacagcgccatgagctgaaggatgcttatgcggactatattgaacatgccgcacaaaatccgagagatgcattttataagcgtgtgaccaaggtactggaaggtgtggactcagcagacgcgcgcacagttatgaccgctatctcacacgatgagtttttattaaagcaacgcacattgagtaatggcaaaattccttatcagatgcagcagcatgaatttgatgccattattgagaatcaaaaagcttattatccatggctggccacgccaaatccagttgaggcggatgctaagcgcctgccgtactaccttgacgaactgattggctttagggtgccttattatgtggggccaatggtaacggaaaagcagtcacagtttgcctggatgattcgtaaagccgatggagaattgacaccatggaatttctttgacgtggtcgatcgggagaaaaccgctaatcgattcattcagcggatgcagacaacagataaatatatcctgggtgaagatgtcctgccgaagcatagtattttgtaccaacaatttgaggtgctcaatgagctgaataatattcgtgtagagaaacatccactgacaactgagcaaaaacaatttatctatcagcgattatttgttgatcaacagcgaaaaacaattaccaagaagaatcttcaagataccttagtggccatgggtgagtttgataaggcacctgatatcggcggtttggctaaggaagacgtgatgatgagcagtctcgcgacgtttgctgattacagcaagattttacccgaagcgattagtgaccccacacggcaaaatgatattgaagatatcattgcatggtcaactatttttgaagacacacagattttctttgataagttgaagacagtggactggttgacgacccagcaacgcaagcgcttggcaagtattcgctacaccggttggggcaaattatcgaagcgattactgcagcagattccaaccagcaagcacaccaacgtgatggcagcattatgggcaacgagcgataatttcatgcaaatcctgcaagatgaacaattccaagaaggtctgtatgatgccaatcgcttaccagaagagacacttacgccggatgaacaggttgaaaaaattctggatgaagcgtacctgtcacctgccgataagaagggcgcgcgtaaggttatcaaggtgatgaacgacattgttcgcgctaatcacggtgttttacccgaacaggtatttctggaatcagctgatgatccgcaaaaaaataagcggcgtagtgtcagccgcagcaagcaattggaagaaaagtacagacaagccgcacagagcttcatcgatgaagcggttaaggaagaactgaatgcacaaattgtaaacagtgcagaattcaatgaccgattggtactatacttcactcaaaatggacgcgatatgtatactggcaagcgattagacattgaaaacctgggtagttaccaaattgatcatattttgcctcagtctctggtaaaggatgactcactggataatcgcgcactgacagctagagatattaatgcggagatgagtaatcagttcgtttctgaacgtttcgggctagggccacgggctttttggcaacaattgaagaataacggtttgatcagtggccggaagttccgtaatttggttatgcaacgtgatgagattgataagtacgcgccgggattcattaatcggcaactagttgaaacgcgacagattattaagacggttgagcaaatcattcatcgcttgtggccagatattcagattgtgacgattaaggcaaatttgacgcatcaggtgcgctctgaattgggcttccccaaagttcgtgagttgaatgattatcatcacgcgtttgatgcattattggctgcccgtattggacagtacttgttggaacattatgctggcttaaaacccttcttcacttatggtgaattcaagcgcggagacaccaagaaatacgggacaacgaattttttgcggcggctaactaaagataataaggacaaaaaaggtgagttgctacctgaagtaagtgattggattgacagcatcgattccatttacaattataagaaaatacctgtggtttgggaaaacacaacgaacatgagtgccctctttgaccagacgatttatccccgacctgatcgtgatacgacaaagcgcaaattgattccgacgaagcttgataaaccgacagatatttatggcgggtattcaagcgctaagacagcctatatggcagtgatgcgggtacagactaaaaaaggtactgaatacccggttttcaatattcctgtctcaatcgcgtctcagctgaatcgtattactgatcagacgatgttaaagcagcaagtcaaacagttcattatcaacgctgaacaaagtgcaagtaaaaagaagttgtacgagagtggcgatgtgattttgtcacgggttgcattaggacaacgatttactgacaaaaattatggtgaagttttcttgatttcaaatatggaagtgcagaatcctcaatcgctttggttgggtcgcgctagtcaacaacgattaacgcgtgaaccagagggcaatgaaaagccagagacatcgctggccgatatttatcagcaaatcttgaaacaggtcgaccgatatttcttggcctttaatattcgccaacaacgccagaaattattgggcactttggaccagtttacgagtttacctgtaggtcgagtcaatgagcagacacgcactgatcagaatcagcgctccattattgcgagagtgatgattgttctcggcaaaggctcgagagaggagaaatttccagaatttggccttagcgcgttaggtcgactggttcgtactggtggtatcacgctctcagaagatgcccagatcatttaccaatctccaactggattgtttgaacgtcgggtggcactgaaggatttatag

SEQ ID NO: 353 - DNA, 4038 bp, Lactobacillus senmaizukei DSM 21775
atggttgaaaaatatggaattggattagacattgggaccagtaccctgggctggaccagtgtcgatgagaatggcaagattcagcgtctaaaaggtcaaacggcgctggggacacggttatttaacgagggacaaacggctgaggaacgccgtgggttcagaacaacccgccgtcgcatccaacgtcgtcgctggcggctacggttactgcgagaaatattcgacgaaccaattggttccgttgatgcgggattttttgctcgtcagaagatgtcgagcctatcaccgcaagatgaccgattcgaagatacttaccgattattcaataatcaaacagataaggccttccatgacgagtatccaacgacttatcatctgcgtcaggcgttaatgaattccgatcgacaattcgatattcgggaaatctatctggccattcatcatattgttaaatatcgcggaaactttttgcgctcaggtaaaccagccgactttaaaacggggaagcttgatttaaaggaaaagtttgaagagattaatgcagactggcaaacgttaattagtgaagatgccccacaattaccagtcgatgatttgacaaccattaaggccgttttggttgatggttcacgaagtcggtcagatcgacaacgcggattagtaaagctctggatggccaatgagaccgttgagaagaattggaagccagtcatgactgaattggccaaggccattttggggctgaagacaaaattgtatctgttgactggtctcgatttgcccaaagaggaccaaaaggcttggaccttcagtctggataccttggaagaccatcagggagatattgacagtttcttcgatgaccatgctcagcagttgatcgatcggttagccgagctacgggcaatgattcagttaacggaaattattcccagcggcctcaacttttcacagagtatggttcagcggtatgaagcacatcggtctcacttagagatgtataaacagtatgccctggatcagacggatcctaagcgtaccaaggcgttgagagcagcttataatgcatacatagatcaacatgaaattgctgatgatttttatacggcggttaagcgagttactaaggatgaccagagtgaaacggccgaggaaattaaccggctaattgggttggaacagtttatgcccaagcaaagaacgaaggaaaacggggttattccatatcaagtccatcaacaagagttggaccaaatcattgcccaccagaagaagtattatccttttcttgggacggaaaatcccgtaatcgatcaccgagaatctcagccctatatgctggatgaattggtgagtttccgggtcccttactacgtgggcccaatggttgccgccaatcctgagctcaagacgaccgagaatccgtttgcctggatgattcgtaaagctcagggtgaaattacgccttggaacttcgatgagaaggtcgatcgtaagggttcggcgacggcatttatcgaacggatgaagactaccgatacctatttgttgggcgaggatgttttgccacagcagagtctcctttaccaacggtttatggtcttaaatgaattaaataatattcggattgatgatgagttgttgacgaccaatcaaaaacagtgggtatttgatcgtgtctttaaaggaaagggcaccatttcagctaagcatctacaagatgccttgaagcatcatggcgaaactgatggtttgcccaagatttccggactagcagatcctaccaagtttaacagtgctttgacgtcgtaccgtgattttcagaaatggttaccaaatgatatcgatcggaaagacagaactgccgatattgaaacaattatcaattggtcaacggtatttgaagatacgcatatttttgtggaaaagttgaaggaaattgagtggttgacggcagatcaacggcgacggattgccagcaatcgttatcgaggttggggccgcttatctaagcacctactaacagaaatcaaggatgaacagggcctgtcgattatggaccagctttggcgaactcaacataactttatgcagattgtgcatgaaccagactatgcgaagcaaattgaagcggctaataccgtgggtatggccaagcaggacattggaactgttattaatgatttgtacacgtcaccacagaataagaaagccattcggcaagtactggcagttgttaaggatattcaaaatgcccatcatggcgtagcccctagctggattttcatggaagccgctcgcggtgctgaccagaatccgcaacggagtcggcaacgtcagcgtcaacttcaagacttatacgccaagactgccgcagatctggttgataccgaagttcaacaggaattgacggataagattaaggataaggcgaacttcaccgatcggttgatgctgtatttcttgcaaaatggtcaggacatgtactcgaaggaaaaattaaatattgaccgactgtcggagtatgacattgaccatattctgccgcaggccttgatcaaggatgattctttggacaaccgcgtattggttcaccagagtattaatcgaaataagagcgatacatttgcttccgaaaaatatggtgcgaagatgcaaggcgcctggcaccaatggcgagcagcgggtttaattagcgctcgtaagcttcgtaatctggagatgcgtccggatgagataagtaagtatgcgaccggattcattcgtcgtcagttggtcgaaacccgtcaggtcatcaagttggttacggaaattttgagtcatcagtataatccagaagagaccaagttggtttcggttaaggcggggctgtcgcatgagctgcgacgcgaggccggtttgccaaaattacgggatctgaatgactatcaccatgccatcgatgcttatttggcggcacggattggtacgtatcttctaaaacgatatccacgactggaacggttctttgtttatggccaatttcaaacgagtcgtttggatctacggcgatttaactttattcatgatttggtcaaaagcaagcaaggcgttattgtggatagcgatactggggaaattctctgggaccgtcagaaagatatcgactatattaagcacttgatgggcctgaaacatttgctggtcacacatgaagtttatgatagcgctgcggaaatgtatgcacagacaatcttcaaagcttctgataacgacagtaaggttttgattccgacaaagaatgatcggccgacggcgatttatggcggctacacgaagcgacggaatgggtacctagctatcctgaagattactgaaaaaaaggcagaaacttatcgtgtagttggggtgccgactctgtatatgagtcaacttgcaacggcccgttcgcacagtgttgaagctgagaaagcgttgctgaaatcgttgatggcgccagagattttaagcgagtccaaggtagttagttttgaggtcgttgtgagccatgttcatttaaaccagttggttcgggatacagtattcggacccgcccattactttgggctgggaccattccgctatgtacgcaatttccaccagttggttttaccattcaaggatcaggagattttagttaagcgaaccccgactgatgaggaattaaatacagtttttgaagatatttgttggcaagttgagaattacttcgctgtattcgatattaatgggtttcgtaatgccttgaaaaaatcaatcgataagtttgaacaattaccgattgaaaatgtttttaaagacaaaaaactagtcacacaaggaaaaaaagaagtcttggcgtttgtaatgcagggactgcacgcaaatgcaagttatcggaatctaaaggtgtcattaggtattaagacaccgttgggccaactacaattaacaaaattcatgttatcaagggatgctgagttaattgatgaatcaccgacgggcttgtttcggcgaattcggcgtctaaaggatttgtaa

SEQ ID NO: 354 - DNA, 3423 bp, Lactobacillus tucceti DSM 20183
acttgtgtatttttagttaaattggggggatttgaagtggatcgaaaaataagtttggggttagacattggtgtttcatcagttggatatagtgtaatagatgttgatactggtaaagttttagaacttggatcacgcctgataaacggtaaaattggtacagaaaaccaagcgcgtcgagagatgcgtggcactagacgattaatcaatcgaaagaaacaacgtcgtaaggatacagttaaattatttaatgaatttaaattgattgattcaaaaaaagatgaacattattttgaccacttcgcaaataattctgatccgtatgaattgcgagtcaagggattgtctgaaaagttgtcactttcagaaattgccgatggtttgtatcatattgttaaaagacgtggtattagttacgatttaaaagacgctgatgaggaatctgaaggttctgaatatgaaaatggattgaagatcaataatagtgagttaaaaaatcaaactccggcgcaaatacaattaaaacgtttgaatgaatatggtgccattaggggtaaggttgttattgatgaagaaaaaattttattgaatgttttccctacaaaagcataccttgatgaagctaaaagaataatagaaaaacaaagagaattttatcctggaattttaacagaggaatttgaagaaaagtattgtcaaatacttactagaaaaagagactactttgttggaccaggtagcgaaaaatctaggactgactacggtatttataaagaagatggtcgaacactaaataatttatttgaggaattaataggacacgacaaaatataccctgaagaactaagagcttcaggagcatcatttactgcacaactgtttaatgttttgaatgatttaaataatttgcatatttcatcatatgaagatcaaaaattaacgactgaaaataaagaacaaattatttcggaattaaaaagtacaacttcaaatgtcaatatgatgaaacttattcagaaaattgctggttgtgaagaatctgatatcagtggttatcgaactgacaagaattacaaacctgaaattagctctatgcgtatttatcgcaaagtccataaaaaacttttagaatctgaaattgatataactaattggccggatgattttataaataagttaagtttcattttgactcttaatactgaaaatggtgaaattagaaatcaattaaaaaatcgtctgcagccagaatatgattttcttactgatgaattgattcagacaattattgataataaagaaagttttgatattaaatctaataataaatggcatagattctctattaaaacgatggagctgttgatcccagaaatgataaaacgtccagttgaacaaatgactttgataaatgaaatgggattgatcaaaaatagtggcaagaagtttagcaactataaatatttgccatataaaaaaattgctgaagatatatacaatccagtagcatctaagtcagtccgtgaagctttgaagatagttaatgcaattttaaaagaatatggtcatatcgagtatattgttgttgaaatgccacgtgacaaaaatgaagatgaagcaaaagatcaaatcgaaaagttccaaaaagcaaatggacgactaaaagatgctgcattggaagaattcacagaggcgattggagataaatccaccgttgacaagaaattgggagtacataggtctaaactcctttttaagataagactttggtatcaacaaagaggaatggatctatatgagggcaaaccaatatctgcagttgatttgttaaataatcctgatagttttcaaatagaccatattattccacagtcagtttcttttgatgatagctttaataataaaacactttgtaattctggcttgaatcaaattaaagataaaaaaacaccgtttgagtatatgaatgagggatatggtcaaggattcgattcaatgaaggccatggtaatgaaaaatccaagaatagatcataataaacgtaaaaattatcttttctctgaaaatgttagtgacattgaaactagaaagaggtttatttctcgtaatttagttgataccagatatgcatccagggtagttttgaataatttgcaggagttctttaaagaaaaagaatcggatactaagatttccattattcgtggtaaatttacttccaatttacgcaagcattggaagataaacaagaatagagatacttatcatcatcatgcaatagatgccactataattgctgcaacgccatttttaaatatttggaaaaagggttctagtattttcccttcaaatgttgaaagtgaagatttttttgatattaagactggtaaaattattggaaatgatgagtttaacaaatatgcgtatgatgaaccttataatggcttttataatgaacttaggaatgctactgatagaattaaattctctcatcaaattgataaaaaaatgaatcgtaaagttagtgattcaacaatttattcaactagagttgcaaaatcaccaaagaataaaaaagaatcagaatatatagttgcaaagatcaagaatatttatgatgcagatgaatatgctaaatttaagaggatttacgataaagacaagactaaatttttattaaataagtatgatccaaggagctttaatcatttagaaaagatcatgaatacttatcctgattcaattgaaagaacaatgagtaataataaagtgaaggtagtaagaatctcaccatttgaactttatcgtcaagatcacggtccagtaaaaaaatattccaagaaaaataacggacctgaaataaagcaacttaaatacttggataaaaaagtcggttctagtattgatgtcacacctgataacgctaaaaataaacacgttattttgaagtcattgaaaccatggcgcacagatatttatttgaatcatgaaacaggtgaatacgaaattatgggtatcaagtattctgatctcaagttcaataagggtgaaggttatggcattaaaaaggctaagtatttagaaataaagcatcgggaaaaagtttctgatgattctgaatttatgtttactttgtacaagaaaaatcgtattaaggttgagaatatggagactgatgaaagtgttgagatgctgttttggtctaggaccatggatagccaaaaggggtatgcggaactgaagccaatttataaatataaaacagaggatgataattggccaatttatgggaatgcaaagaaacaaattataaaaaaactgattcccaaaaactgtaaaatatggaaagtaaatactgatgtattaggcaatcctttttatgtagaaaaagaaggagaatatcctaaagatgtccttgattaa

SEQ ID NO: 355 - DNA, 3942 bp, Lactobacillus versmoldensis DSM 14857
aaaaataatctctggggcgcgcgcttatttaaagaagcagagaccgctcaagttaccagaggtcatcgttcaatgagacgtcgttatcgaagaagaagaaatcgtttaaattggctggatgaattattcgcagatgaactagctaaaatagatccttcatttttattacgaatgaaaaattcttgggtctctaaaaaagaatccactcgtaaacgtgacccttacaatttattcattgatgagaaatataatgatgtggattatttcaatcaatatccaacgatattccatcttcgtaaggaattgatcactgaagataagaaggtcgatatcagactaatttatttagcaatccacaatattatcaagtaccgtggtaacttcactcttgaaaatcaaaattttgatatttctcaattaagcagtaatttttcacaacaaatcagtgacttttttgctttgtttagtgattttggagtcatcatgcctgaagatttcgatcccgacaaaatcagtgatattttactgaatcccaatctttcaccttcgggaaaagtttctgaggcaatagcaactatctctccaaaaactaacgtaaaagccaaaataaaaattattttattattacttgttggtaacaacggtgatttgaaaaaattatttgatttagaaacaactgaaaaaatagctgttaaattatcatctcgacatatcgacagtgaattgccaatcattttatcagaactgaatgagcaacaagaaaatattattaccattgccaattctatttttggttcaatcattctaaaggactttcttggcgatgagacctcaatcagtgcggcaaaagtaatcagttttgaagatcataaacaagatcttcaaaaactgaaaactatgtggcgcgagacttctaacaaagaagcagtcaaagctggtaaaaaagcttatgaagattatattggtcatgaggactctgaaactttttacaaaaaaatcaagaaatttttggagaaagctcaacctgttgatcttgcaaataaggcactggcagaaattgaattggaaaattatctacccaaacaacggaaccgaaataatacagttataccttaccaactcaacgaaaacgagttgattgccattctagaccaccaagaaaaatattatcctttcttaaaagaaaatcgtgacaagatactttccttgctcacatttcgaattccttactacgttgggccattacaagactctaacaacaatcgtttttcttggatgacccgtaaagcaagtggtgcaataagaccttggaatttttctgagaaggtcaacgttgaacaatcttcaaatgatttcatcaaacggatgcgttcgaccgatacttatttgatcggcgagccagttctaccgaagaaaagcttgatctatcagtgctatgaggttctatctgaattgaacaacacccgtgtaaaggatggcagtagcaatcctaaacgcttagatgtcacaattaagcaacgcatttacaatgaaatatttaagaatcaaaaatcagtttcagttaaggtattgcaaaactggctgataaaagaaagctattttaaatcaccagaaatctctggtttagctgacaaaaagaagtatttatcatctctttcgacctacattgatttcaagaaaatttttggacagaggtttgttgatgaccccgtcaattcgccgcaattggaagaattagcagaatggttaacactctttgaagataagaagattctgttaatcaaattgcaaaactctaaatactcttatgatcaagccactatcaataaattatcgacgatgcggtatcaaggtactggaaaactttcaaaaaaattattagtagatttgaagactactaaaaagtcaattggcaaaagtggcgctgaatctctttccatactggatttgatgtggtcgactaaagataatttcatgcaaatcatccacgatgcagattatacttttgagcaacaaattaaagaattcaactatgatacggaagatgagctgacgcctttggaaaaagtggccaatttacatggctcacctgctttgaaacggggattgaatcaatcgatcaaggttgtcgcagacatcgtcaaatttatgggccacgatccagaaaaaatctttattgaattcactcgttctgatgacttcagcaagttgactatttctagataccgtcggatcaaaaagcagtatctagaaattgccaaggcaatcaaaaaaataccagcagaatttaaagacatcaaggaatatcaaactcaacttgaggaaaataaaggcaagttggcaagtgaaagactgatgctatacttcctgcaatgtggtcatagtttgtacagtaataagccgattgatttaaatatgatcaatagttctaagtatcatgtagatcatatcttgccacaatcttacattaaagatgactctcttgagaataaggctttggtcttagcttcagaaaatgaaaataagatcgacaacatgctgatcagtcatgacatcattgctactaacttaccacgctggcaggctttgaaagaccagaatttgatgggatccaaaaaatttgctgatttgacaagaacaaccgtgactgaaaaccagaaaaaaggatttattcaaagacagctagtccagacttcccaaatcgttaaaaatatcacactgattttaaatgatctttataaaaatactagctgtattgaaactcgagctactctctcaagcgaatttaggaaagcctttagtaatttcgacgaaactacttatcattatcaatttcctgaatttgttaaaaatcgagatgtcaatgattttcatcatgctcaagatgcttttctcgcttgtgttatcggtgaatatcaactaaaaaagtatcctaaagataatttacgattagtctatgaccaatattcaaagtttctcgattcactaaaaaaagacacccgcaaaaaaaatggacggatgccaagatacactcaaaatgggtttattattggatcaatgtttaacggtaagacctacgttgatgacaacggtgaaattatttgggatcaaaaaatcaaggagtccattcgtaagacctttaattatcatcaattcaatgtcgtcagacaaaccattgaacagcatggaaaacttttcaacgacactatccaaccacacagtgacaggtataaattgattccattgaagaccaatcgtgacccagctatttacggtggatacaataacgataacaatgcctattctgttgtgctggatgttgatggtaagaaaaaaataaacggcattcctattagaattgctaaccaactcaaatctgatgaacttgatctaagcagttggcttgaaaataatatcaaacacaaaaaaccaatgactattttaattgataaagtcccaaagtatcaacgaattatcaatgaagaaacaggtgacctattgattacttctgcaaacgaagtaatcaacaacgtacagttgttcctaccaagtatgtacaccgcattaatcagtttattagattcgacaaaaactgaaatgtattcaaaacttttaagtaactatgaagcaaacattttaatagatatttacgattatctactgactaaattgaaaaataactacccactttatcgaaaggagtgggccaaactagctgaacatcgtgatgactttattgaatctgatctggtaacgcaagccagtactctgcaacagttaatcaagtttatgcatgctgatccttcaaatgttaatttaaaatttggtaattttaaaggcaaccgttttggtcgtaaaaatggcaatattaaactgtcaaaaactgattttatttatgaatcaccaaccggattatttaaatcaattaaacatatcgactaa

SEQ ID NO: 356 - DNA, 4068 bp, Lactobacillus zymae DSM 19395
aagggatttattaatttgtacaaaaaatacggtattggattagatattggaaccagttcaattggctggtccgtggtggatgagtacggtcacatcatccgggtcaaagggcaaaccgggttaggtgttcggctttttcgggaggggcaacccgcagcggacagacgaaccttccggacgacgcggcgccgtttggggcggcgccggtggcggttacggttgctacgtgagatttttgacccatacattgccgcccaagatccaaacttttttgcgcggcaaaaggcgtctgcaattgccccgggcgattcgcgcttcaaggccgtttatcggctttttaacgaccaaaccgaccggcaattctacgataagtacccgaccgtctatcatttgcgccagaagttgatgaccgaaaaacgtcagtttgatatccgggagatttatttggccgttcaccacatcgtgaagtaccggggccactttttaactggtggtgccgcgaaaaactttaaaccagggaagctggatttaaacacctattttgcaacgattaacgcccaattagcggcaattttcatggattcacaggtggagcttccccaattggattgggatgcggtggtgtcattgttgaccaacgaccaggaatcgcccagtgaccggcagaaggcgttgactaaaatgctggtggctcagggtgatgcgacgcaaaaacggttctataccgagttttcgaaggccctgctggggttgaaagctaagctttacgttttaacgggattcgagggggataagactgaccaaaaggccttaacgttaagtttggagactttagatgaccatcaagatgatgttactcagttattgggggatgaacagcgtcagttggtagaattattggccagggtgcagtctgcaatccagcttgccattattattcccaacggcaagacgttctctggccagatggttcagcagtaccaaacgcattatgaccaattgcggctcttaaaagactatcgggaacaattaacggatcaaaaacaccggcgggccctgaaacaggcttacgccgactatctggcaaatgatcaagatcaggatgccctagtcaaggcggtagagaaagttttaaagcagaatcagccgcttagtaccgtgggcgtacggttacaaactgccattgacgcgggggactttctgcccaagcagcgaaccaaggcgaatagcgtgattccgcatcaaattcatcagcaagagttggaccgaattatcgaagctcagtccgtttattatccttggttagctgaggaaaatccggtggcagcccatcgcagctatgccccatataagttggacgaattagttgattttcgggttccatattacgtggggccactagtacagccgcaagcggataaagcggctaaggaaaccaagtttgcgtggatgacgcgcaaggaagcccagtcgaccacgcccatcacgccctggaactttgagcaagaggtggaccgtaacgcctcggcgaacgcattcattcaacggatgaagaccacggatacctacctattaggcgaggacgtgttaccaaaaaatagcctgttatatcaacgcttcgaggtattaaatgaattaaacaatgttcgcgtggacggtaagctattgacgattgccgaaaaacaacgactttttcaggacctatttgttgaccggtcacaagcgtcagtcaccatcgcgcaattacaagccaatctcatcgcgcacggtgccgctaaggaccgggtcgaaatcaaagggttggctgatcctaagcgtttcttgagcagtttaacaacgtatcacgattacgctcaaatcattccggaagccttggaacaaccggacaagcgtgccgatattgaaaaaatcatcaactggtcgaccatttttgaagatacgtcgatctttaaagaaaagctgcaggagattgcttggctcacaccagaccagcgccgccagttaagccaaaagcggtaccgcggttgggggcaactctctgataaattattaactcagctgcgcgatgcgacggggcagtccgtgatggatttactatggactgaaccgaataactttatgcagatcattcgtcgaacggaatttcagcaggcgattgcgagagtgaaccagaccgacctgaagcaacaggacttagcgacaacaatcaatgatctgtatacgtcaccgcaaaacaaaaaggcgattcgccaggtcttattagtggtcgccgatattcaaacggcgatgcacgaagtggcgcctagctggctattcatcgaagcggcacgcgggccggaacagaatcctaagcgtaagttagcccgccaacagcaactgctagaagcctataaaacgagtgctaaagaaattgttaacgaagccgttaaggaaaagttactgtcggcaattgacgaccatcaaaaattcgaggatcaggtagtcctgtacttccaacaaaatgggctcgatatgtatacggggaagccgttagactttgagcgcttgtcgaagtaccacattgaccacattattccccagtcggtggttaaggacgattcactggataatcgggtgctgaccacgccagaggaaaatgaacgaaagggtgcccgggtccccggaccgttgtacgcgagtcagcaaggccggtggcggttattgcaacgggccggcttgatttcccaacggaagttggaccacctactcttacggccggaggaattagaccaacaggctacgggctttgttgctcggcaattggtggagactcgtcaggtgattaagttgattaccaatattttgagccaacagtatgatccggaacaaacgaaattggtctcggtcaaagcgggattgtcgcatcaattccggaccaggttaaacctacccaagctacgggaactcaatgattatcaccatgcgcacgatgcctacttagcagcacgaattgggacctatttgttacaacggtaccccaatctagaacggttcttcgtttatgggcagtatcagaaaacacggtttgacttaaagcggcattttaactttattggggagatgttgaaaggcaagccagaggatgcggtgattgttaaggcaccacactcggagaccgttatttgggataagcaggatgaagtcaaacagctgaaaaaaataatggaatacaggcatttattagttactcatgaggtttatgataaccatggcgcactatttaatcaaaccattcatccggctaaaaatcctaaaaacagaaagttaattccgcgcaaaaccactcaatctacagaactgtatggtgggtatagtggtgaaacaaccggctatttagccatcgcacggacggttactaagaacaagataagctatcaagtattgcgggtcccgacgcgtttggtggggcgcctgcaacgaagtagtgagtccgcacaacgacagattctgacggactggtttgcacctagctttgtttcccggggtaaacaacagccgtttgaaattgtcttacgccatgtatttaaaaatcagacagtgattgatgatattcatgaacaatcacatcgttttggattgagatcagatacttattattgtaatcagcagcaactggttttgtcgctagaacagcaaagaatgataattgatcagaaattaaataatacgaataagttgatggtggtttatgaagctgtttgtgatcaagtggcgaaatattttccactttatcgaatgaatcactttaaggaaagtttgttagaggcgggcccgaaattagccgagttgccaattaataccgtacaatctaaaaacggaaaattgaaattagggcaaagaagtgtccttctacagacaatgcaaggattacatgctaatcctgagacaaaggatttgtccattattggatgccctaagtattttggaaagttgcaagtttcatcaggtattaagttaactgagaatgccgtgttaattcatgaatcaccaactggattattccaacgacgcgttcgtttaagtgattta

SEQ ID NO: 357 - DNA, 4068 bp, Leuconostoc gelidum JB7
atgacatattcaattggtttagatattggaacaggttctgttggatgggctgttattggggatgattatcgtttaaagcgtgctaaaggtaaaaacttaattggcgtacgactatttgactcagcaacaacagcagctgaaaggcgtggttatcgtacgacgcgtcgacgtttatcacgccgccattggcgtttgcgtttgttaaacgatatttttgcatcagatttagcagaacaggatgaaaattttttgccacgactcaaatattcatgggtcaacccagatgatgagcaaaatccgcagttgaatagcgatgttgcaaacggtgcgttgtttggatcaagcgagacagataaagcatttcacaaaaattatccaacgatttatcatttgcgacatgaacttatgacagatacggctaaacatgatttacgtgaagtttatttggcaattcatcatatcgtaaaatatcgtggtaattttttaaatacagcagataaaattaacgcagagaattcgttcaatgttgacctatttatagcagcgttagacgaatataatgaatttctagaaacacctattacatcaattaaggatgcgcaattattttcagataagctaactgacataaacgctcgtaacaaatctgtccgtgtagaaaatgcaatgtcagaaacttatgatgataaatctaaaatatttaaagctatattgacagcactagtaggtaatacagctaactttcaaactatttttgacttatctgatcttgaaaaagatgaagctaaaaatttcaaatttaaacttgacttagaagatgtcgagacaaaactagatgttgtgcgagcaaaactttcagatgaacaaaatgcttttctagaggctgttttaatagcgtatgatggtatcactttaaaaatgattttgggtgattataaaagtattagtcaatcaatgattgaaagttataagtcacatcaacgtgattggaagtatattaaaaataatgtgcgattaaacgagcaaaaaattgaaccagacaaaaatagtgttaaattttttaaattagatccaaaaaaattgatatatccatcaaatttggcttatttacaggtgatttcgtcaaatgaagatgagcatagaaagggtttggactattttaaaacagctattcaagatgcggatattttacaacgtattgagaatgatactttcttaccaagacaacgtacaaaacggaatggcgttttgccatatcaattacatttagcagagttagaacaaattattaaaaagcagagcaaatattatccatttttagctaacatatacacgcaagacaataaaacagaaaacaaattgatcgggttattgaaattcagagtaccatactatgtcgggccacttgttgaagcagaaaaagttacaggagatggtaaaaatcattggttaattaaaaaagaactgcaagaaaacacaccaattacaccctttaattttgatgacgttgtagataaagataaaagtggtgagcagtttatcaaacgcataactggtactgatagttatttaattggagaaccaacgttaccagaaaattctcttttgtatcaaaagtataacgtgttacaagagttgaacaatgtgcgcaatgaaagacatcaacggttaccgattaaagtgaaacaagatatatttgaacatgtttttaaaattgataaaaatgttaatgctaaaaaagtgatggcctatctcaaattaaatggatatggtgattttcaaatagctggtttatctgatacacgcacaggcaagtttaatagtaatttgtcaagctataattactttgttgacctactcggtcgcgaaaaaaccgaaaaaattagggaagatagattagaagaaattattgaaatacaaactgtgtttgaagataaaattctcgtcgctaaacgactatctaatctagactttttaacgcctcaagaaaaaagcaagctatcagcaaagcattacactgggtggggcaggctatcgcagaaattactcacaacgcaatttataaaaacggctctatctgaagcaggggatatcataccacagtcacacagtataatagacttgctctactatactgataaaaatttaatggaaattttgaatgataaaacattcaatgtacgaaattggctgacagaacagaataaaggaacagagtctggcaatagcctctatgatcaaattgatgctttggcaggtccaaaggatattaagcgtggtattacacaagtgtttagtattattgatgatattaaaaaagcaatgggtagcaatccagaaacagtgtatttggagttcgcccgtgaaacacaaacttcacgtttaacaaattctaggttaaatcgtgtgcaagaaatatacaacagtccagaattaaagactgaatttgcatatctagccaagaaattagaagctgaaacaaaagagtcaattcatgatgatagattatatctatattatctacaagaagggcgggatatgtacactggaaaagaaattccgtttgatcaaataagcagtaactatgatattgaccatattattccacaggcatttacgaaagatgattcacttgataatcgtgtactggtcaaccgtgcaacaaatgcgagaaagtctaactcgccaacctttacgaatgatattattgataaccggaaatcttggtggcaatcattggtcaaacgtggtttaatgtcaaaagaaaaatttgaacgtttgactgataagcgtaaaacctttagcgagaaccagacaaatcattttattgcccggcaattagttgaaacgcgccagattattaaaaatgttgctgacttgattaagaataactatgatggcactcaggcagtcgcaattcgagcatcattaactggtgaaatgcgccgttatttggattggccaaaaaatcgtgacatgaatgattatcatcatgcacatgacgcgttaatgatggcaactgttgggaagtatgttgataggcgtggcttttttgataatggcagtgtcagtgatggtgctggaaatgcctataacttatatactaaagattggttagtcgcagctcgtgtaggaactagaaatgatagtcaacgtgttaatccttatggttttattgttgggtcaatgaattcaaaagcagttcgacaacaggtaaataaagaaaccggcgaaatagtctggggtaatgaaaacttagattatttacgtcatgtgttgagttataaaaaaatattagttacacgacgattaagtggctcatctggccgattgtatgcggagacgttgttcagcccaaatcccaaagctaaattaattgcacaaaaagctaatcgttcggttgcattatatggtggtttcacaaaagctgaatctgcctatacggcgctggtggaatttaataagaaaggcgacaggtcgtacaagctgataaaggtgcctatggcaatagccaatcgtgttaatgataaacaaataactgtaacggcatacattgcatctttaaatttacgtgattttagtcgcgttgttcttgaacatttaccgctcggcactttgattcgagaatctgatggtagtgaattttatgcagctagttcagaatataaacataatgcgaaagaactttgggcgcctaaagaaattttgagaagttcaaaaaaattagataaagcaactgctgataatttaattgatatttttgattttttgaccaatgataaaacaatcagtaattttaaattttatgagaaagatttattacacttgaaaaatgttcgtgataaatttgttgaagcaagtgatgaaatcaagattaaagttttatcggatgttatttatgaattgcataatgatgctgggtggcgcgatccgtttaaacatattcaggagaaacctgcttggactatgttacaagtcaagggtgggatcaagttgtctgagaaagcggcaattgtatatcaatcacccacagggttatttgaaacaatcaccattgttggtgaataa

SEQ ID NO: 358 - DNA, 2676 bp, Leuconostoc pseudomesenteroides 4882
ctgaagcgcacaaaaggcaagaatttgattggggtacgcctgtttgaaggagctgatactgctgctgaacgacgtggttatcgtactacacgccgtcgtttatcacgtcgtcggtggcgtttgcgattgctgaatgatatttttgcatcggagttatctaaaattgatgaaaactttttgccacgcttaaaatatagttgggttaataaaaatgatactgataatgtacactttggtgtaggggtttttgataattctgaacaagaaaaggctttttatcaagattatccaacaatttatcatttgcgccaaaagctgatgacagacaatcgacaacatgacttgcgtgaagtttacttagcgattcaccatattgttaaatatcgtggccattttttgaattcaggtgaaattagtgcaaatagtagttttgatgcgcaaaaatttctggaattattgcgtgaatttgataatactttttatcccgatgctgttaagtttttaaacttagatcaattggatttaccagataaaatttcttctgaaatcagtgattcgaaaataagtaaaagtgaacgagttgacagggttttgcaacatgtacaattagcgaactctggtgcgaagaagatactgaaagccatattaaatgctgttgttggtaactcagttgacagtgttgctatgttttcgcttagtgatttggataaggaagaaaagaaaaaaatcaatcaccctgtaactgatagtaaaccctttaagtattctgataaagaggttgaggctaagttggatgagctctctaatttattacaagatgagcagaaaattgaattcttgtcgttgttgaaattatcttttgatggattaactttaaaaatgttacttggtaacgctaaatctgtgtctgaagcgatggttgaacgttataaagtgcacaaggacgatttaaaattcattaaggaaaatattttaaattcatttagtaaggataagaagaaagaatttgataaatactatgaggctcatttagcggaaaaagacgttgataatgttgataagtattttaagaaaataattgacgactcgataatttcaaaggataagaaaattgagttattgcagaaaattgatgatcatgattttttgccgtcacaacgaagcaaaattaatggggctattccgcatcaactacaccgtaatgaattagataaaattatttcgcaacaaagcaaatattatccatttttagccgattcgtatacacaaaatggtaaaactgaaacaaagctcgccggattggttaattttagagtgccatattatgttggtccactcgtttctaaagaaaatgctgatcgtaataatcctgacggtgggcaaaatcactgggtagaatttaaagaaaatactagtttatctaatctaacaccatggaattttaatgaaattgttgataaagataagtcagcagcgaagtttatcgagcgattgacaggaatggatacttacttaattggtgaaccgactttgccgcaaaactcgttgctatatcaaaagtataatgttttgcaggaacttaataacatccgtgtagataatcacaaattagatgtgaaaattaagcaagatgtttttgaacatttatttaaaacccaaaatagtgtttctgctaaggatgttaagaattatttaattgccaatggttacgctgcgccaagtatacaaatcacaggcttatcagatacgaatgaaaaaacttttaatagtaaattgtctagctacaattatttggttgataagctgggtagaacttttgttgagtcagtcaaatcagatgtcttggaaaaaatcattgaattgcaaactgtttttgaagataagactgtactgttaagacaattatcaatgatttcagaattaacattggcgcaagcaaatcaattagctgaaaaacactggaccggctggggacggctatctcgcaagttgttatcttcaaaagtagttgatgttaataaaatcacaaattcgacattttatcctgcaacaagtagacaaactatcatcgacacactgtatcatacacaacttaacttaatggaaatcattaataatgcagaggacttatatggtgttcgtcagtggattagtgaacaaaataaaagtgatagttcagatactaatgatgtctatgatcaaattcaagaactagctggagataaaaagattaagcgtggtattacgcaaagttttcgaatacttgatgatattgttaaggcgatgggtggggaacctgaacgggtttatttagaatttgccagagaaaatcaacaatctggtgtatctttttctaggaaaaatttactgtcaaaattatacgaaaatgattctctaaaacaaacattcaaagaacttaaatctcaacttgagagtgaaaccaaagaaaatctacaaaatgatcgcctatatttgtattatttgcaacagggacgagacatgtattccaatgatgagttaaatattgatcagttatctagctatgatattgatcacattattcctcaagcttacaccaaagacaattcgtttgataatcgtgttttagtttcatcaaaagcaaatcgcctaaaacgaatgcttctgtggtacccagtgaagttgtcgaaaaaatga

SEQ ID NO: 359 - DNA, 4179 bp, Oenococcus kitaharae DSM 17330
atggtttttatggcacgggattattcagttgggttggatattggaacgagttctgttggctgggcggcgattgacaataaatatcacttgattcgagcaaaaagtaagaatttgatcggagtcaggctttttgattctgccgttactgcagaaaaaagacgaggctatcgtacgacacgtcggcgattgtcacgcaggcactggcgtttaaggctattgaacgacatatttgcagggccactgacagatttcggggatgaaaattttcttgcacgtctcaaatattcttgggttcatccacaggaccaatcaaaccaggctcattttgccgccggactcttgttcgattccaaagaacaggataaagatttttataggaaatatcccacaatctaccatttacgattggcattgatgaatgatgaccaaaagcatgatctcagagaagtctatttagcgattcatcatctagtcaaatatcgtggtcactttctcatcgaaggcgatgtgaaagcagattctgcttttgacgtacacacttttgcagatgctattcagagatatgccgagtcaaataattcggacgaaaatttacttggtaaaattgatgaaaagaagttgtctgctgcattaactgataaacatggttcgaagtctcaacgcgcagaaacagcagaaactgcttttgacattttagatctacaaagcaaaaaacaaattcaggcaattttaaaatctgtcgttggtaatcaagctaatttgatggcgatatttggcttggattcatcagctatttccaaagatgaacaaaaaaattacaaattctcttttgatgatgctgatattgatgagaaaattgcagatagtgaagcattgctgtcagatactgaatttgagtttctttgtgatttaaaggcggcttttgatggtttgaccttgaaaatgcttctaggcgatgataaaacggtcagtgccgcgatggttcgccgctttaatgaacatcaaaaagattgggaatacataaaatctcatattcgtaatgcaaaaaatgccggcaatggtctctatgagaaaagcaaaaaatttgatggtatcaacgcagcctacttggctttacaaagcgataacgaggatgatcgcaaaaaggccaaaaaaatttttcaagatgaaataagttctgccgacattccggatgatgtaaaagctgattttcttaaaaaaattgatgatgatcaattcttaccaattcaaagaacaaaaaataatggtacgattcctcatcagcttcaccgtaatgaactggaacaaattattgaaaaacaaggtatttattatccatttttgaaggatacatatcaggaaaatagtcatgaactgaataaaataacggctctaattaattttcgtgtgccgtattatgtcggccccttggtagaggaagaacaaaaaattgcagatgatggaaaaaatattcccgatccaaccaatcattggatggtaagaaagtccaatgatacgattacgccatggaatttaagtcaagtcgtagatttggataaatcaggcaggcgatttattgagagattgacgggtacggatacatatttgataggcgaacccacattaccaaaaaattcgcttttgtatcagaaatttgatgttctacaggaactaaacaatatccgagtatccggccgccgtttggacattagggcaaaacaagacgcattcgaacatctttttaaggtacaaaaaacagtctcagcaacgaacttgaaggattttttggttcaggccggttatatttcagaagatactcaaattgaaggattggctgatgtaaatgggaagaattttaataatgcactaacaacctataattatcttgtttcggttttaggaagagaatttgttgaaaatcctagcaatgaagaattgttggaagaaataacagaattacaaaccgtttttgaagataaaaaagtcttgcgcaggcagcttgaccagttagatggcctttccgatcataatcgagaaaaactgtcaagaaagcattacaccggttggggacggatttcaaagaaacttttaaccacaaaaattgttcaaaatgctgataaaattgataatcagacttttgatgttccccgtatgaaccaaagtatcattgatactctgtacaatacaaaaatgaatttgatggagattattaataacgcggaggatgattttggcgttcgggcctggattgataaacagaatacgacggatggggatgagcaagatgtttacagtctcattgatgagttagctggtccaaaggaaataaaacgtggtattgttcagtcctttcgaatcctggatgacatcacaaaagctgttggctatgctccgaaacgtgtttacctagaatttgcaagaaaaacacaagaatcacatctaactaattctcgaaaaaatcagctaagcacattattaaaaaatgccgggctgtcggaacttgtgactcaggtgagccaatatgatgctgccgctttgcaaaacgaccgcctatatttgtactttttgcagcaaggcaaagatatgtactctggcgaaaagttgaatttagataatctttcaaattacgatattgatcatattattccgcaagcctacacgaaagataattctttagacaaccgtgtgcttgtcagcaatattactaacaggcgcaaatctgattcgtcaaattatttgccagctttaatcgataaaatgcgcccattctggtctgtgctttcaaagcagggcctattgagtaaacacaaattcgctaatctgactcggacacgtgattttgatgatatggagaaagagcgttttattgcacgttcgctggtagaaacacgccaaattatcaaaaatgttgccagcttgattgattcgcattttggcggtgaaacaaaagccgttgccattcgttcatcattaacggctgacatgcggcgttatgtcgatattcctaaaaaccgtgatattaatgattatcaccacgcgtttgatgccttacttttttcaactgtcggtcaatatacagaaaatagcggactaatgaaaaaaggtcagctttcagacagtgcgggaaaccaatataatcgttatatcaaagagtggattcatgctgctcgtttaaatgctcagtcgcaaagagttaatccatttggttttgttgttgggtctatgcggaatgctgctcccggaaaattgaatccagaaactggtgagattacgccagaggagaatgctgattggtccattgctgatttggattatctgcataaagtgatgaattttagaaaaataactgtgactcgcaggttaaaagaccaaaagggccaattatatgatgaaagtcgttatccatccgttttgcatgatgccaaaagcaaagcatccatcaactttgataaacacaagcccgtagatctatacggtggatttagttcagctaaaccggcctatgctgcattaattaaatttaaaaataagtttcgattggtcaatgtgctgcggcaatggacttattctgataagaattctgaagattacattttggaacagattcgtggaaaatatcctaaggctgagatggtcttgtcacatataccatatggccagttggtaaaaaaagatggtgctttagttactatctcatcagcgactgaattgcataatttcgaacagctatggctgcctttggctgactataaattaattaacactctcttgaaaacaaaagaggataatctcgttgatattttgcataaccgcttagacttgcctgaaatgactattgaatcagctttttacaaagcttttgattcgatcttatcttttgctttcaataggtatgctttgcatcaaaatgcattggtaaagttacaagcacatcgtgatgactttaatgctttaaattatgaagataaacagcagactctggagaggattttggatgccctgcatgcgagcccggcttcttcggacttgaagaaaatcaatttatcgagtggattcgggagattattttctccctcgcatttcacattggcagatactgatgaattcatattccagtctgtcactggtttattttctactcaaaaaactgttgcacagttgtatcaagagacaaaataa

SEQ ID NO: 360 - DNA, 4137 bp, Pediococcus inopinatus DSM 20285
atgaaaaataaggactatagtatcggattagatattggaacgagttcaattggctttgcggtggtcgatgaaaataaccatgtcatgcgcgtaaaaggtaaaaatgcgattggggtgcgtctatttgatgagggaaagccggctgccgatcgacgtgcttttcgaactacacggcgtcgcctgagtcgccgtcgctggcgcttaaagttattacgtgaaatctttgattcgtacataactcccgtggatgaagcattctttattcggttaaaagaatctaatttatctcctaaagatagtaaaaaacaatattcaggggatatcttatttaatgatcgttcggataaggatttttatacaaaatacccaacaatctatcatttgcgtaatgcattgatgaccgaacatcaaagatttgacattcgtgaaatttatttggcaattcaccatattgtcaagtttcgaggccactttttaaatgccacgcctgctaataattttcaagtgggtaagcttgatttggaccaaaaattcgaagatttaaatgatatatatcaacgtgttttccctgacgattcaattgaatttcgaatagataatttagagcaaattaaagcagttttgttggacagcaaacgaagccgatctgatcgacaacgatccttagttgacgatgtttatcaaacgtctgaagacaaagaagttgagaagcaaaataaggctgttgcaactgaagtattaaaagccattcttggaaataaggcaaagctaaatataattgctaatgtagaagtggacaaagaagctgcaaaagaatggacgatcacgtttgattctgaaagcatagatgatgatttagctaagattgatggacaaatgacggatgacgggcgcgcaattgttgagattctgcgtagtttatactctggaatcacattatctgcaattgttcctgaaaatcatacattatcacaagcaatggttgcaaaatatgacctgcataagaaacatttgacactgctaaaaaaattaattaatagtatgacagataccaagaaagccaagaatcttcgtgcagcatacgatgggtatgttgatggtgtgaaaggtaaagttttaacccaggatgagttttataaacaaattcaatctaatttggatgagtctgtggaagctagtgaaattcaaacttatattgatcaagatatttttatgccaaagcaacgaaccaaggcaaatggctcgatcccgcatcagttacaacaacaagagttagatcagattatcgaaaatcaaaaagagtattatccttggttagcagaattgaatcctaatcctgataagaaacggcaacagcttgccaaatataaactagatgagttagttacatttagagtgccatattatgttggtcccatgattactgcagaggctcaaaagaaacaatcaggtgctgaatttgcctggatgattcgtaaagagagtggcaatattacgccatggaactttgatcaaaaagtcgaccgtatggcaacggccaatcaatttattaaacggatgactacgacggatacttatttgttgggtgaagatgtattgccatcacaaagtttgttatatcaaagatttgaagtcttgaatgaattgaacaaaattcgaattgatcgcaaaccaatttctgttgaattgaaacaacaaattttcaatgatttgtttaaaaagtttaagaacgtgacaatcaagcatcttcaagattatcttgttgcacaaggacagtattctaaacgaccgcttattgaaggcttagcagacgaaaaacgattcaatagcgggttaagtacctataatgatttctgtggcatttttggtgcgaaattagttgatgaaaatgatcgacaagcagacttagaaaaaattattgaatggtcaacaatttttgaagataagaaaatttaccgtgctaaattaaatgatctggcctggttgacagacgagcaaaaagataaattagcaactaagcgttatcaaggatggggcagactatcaagcaagctattaataggcttacaaaattctgagcatcgcaacattatggatcttctctggattggtaatgaaaacttcatgcaaattcaggctgattcagattttgctaagttaattaaggatgctaatcaaaacgcactccaaaataatgattcacaggatgtcattaatgatctttacacatctccacagaataaaaaggctattcgccaaatcttgttagtcgttcatgatattcagaacgctatgcatggccaggcacctactaagattcatgtggaatttgcgaaaggagaagagcgcaatccacgtagatctgtacagcgtcaaagacaagttgaagcggcttatgagaaagcgtcaaatgagttagtaggcgctaatgttagagaagaactgaaagatgcgattactaataaacgtgatttcaaagatcgtttattcctttacttcatgcagggcggagtagatatgtatagtggagaaccaatcaacattgataatctttcacgctacgacattgatcatattcttcctcaagcttttgttaaggatgattcgttaaataatcgtgttttgacggatgcagaaaagaatcgacgtaagtcagatgctgttcctaatgagctttttggtgcgaagatgcgtgtaacttgggaaagaatgaaggaacaaggattaatatcaaaaggcaaatatcgaaatttgactatgaatcccgaaaatattaacaagtataccgaaaatggctttattaatcgtcaattggtggagacacgtcaggttataaaattagccgtgaatattttggctgatgagtataaagaaaatacgcaaatcatttctgtcaaggccgatttgtctcatcaaatgcgtgaagattttgaattgttaaagaatcgtgatgtaaatgattatcatcatgcttttgatgcctatttggcagcgtttatggggaattatcttctgaaacgttatccaaaattgaggtcatactttgtttacggtgattttaagaagtttacacaaaaggaaataaagctaagacgctttaactttatctatgacttgaaacatgaagaccaagtaatcgataaagaaactggagaaatattatggaataaaaacgaagatattgcatatattcgtcatttatttgcgtataaaaagattcttatttctcatgaggttagtgaacgtcgcggggctttatataatcagacagtttataaagctagtgacgataaagccagcggacaaggaagcaagaaattaatccctataaaatctgataaacctactgaaatatatggtgggtacacggggagaacgttagcttatatgactatagtgaaagttacaaaaggtaaaaaaattagttataaagttgtgggggttccgaccgctgttttggccaagatggctggcgtaaggcaaggctcacaagaagaacaagacaaattgtatggtgttttgaagccacaatttacgcatcaaaaggaaaataagaaaaccggtgaaattactgagacagtggataaatttgatattattgtgccaaaagttaagtatcaacagctggttaatgataatggacaattatttatgattggaagtgatacacttccctataacgctgaacaacttgtcttatcaaaagaatcagtacaaactatcaataatccaggtatcaaagatgaaggtagtgatgaagaatcagaaaataaaaaattggataatgtatacgatgagattgttttatgtatgaataaatattttccgttatatgacaatagagggttcagaaatagtataacaaatgggaaaaacaagtttttaaaattgccaatcaaaaacatttataaaaatggcaaattaataaatgttgggaaaagagaagttattaatagaatcttacagggactacatgccaatgcttcagttacagatttgtcaaatttgggaattaaatctccatttggatttctacaaaaaggagctggtctttctcttagtggagaggcccagcttatccatcagtcggcaaccggattatttgaacatcgggttcaactaaacaaaattaagtaa

SEQ ID NO: 361 - DNA, 4125 bp, Pediococcus lolii DSM 19927
tcgggggaaaaacgatatagtgagattaataacgttgaggaggaattttatatgggtgacagaaagtataaccttggtctcgatatcgggacgtcatcaattggctttgcggcagttgacgaaaataaccaacccattcgagtcaaaggaaagacggcaattggggtacgtctctttgaagagggcaaaacggcggcggatcggcgtggttttcggactacgcggcggagattatcccggcgccggtggcggatcaatttattgaacggaatttttgatgcgcaccttgccgaggtggaccccacctttttggcccggttaaaagaatcgaaccggtcaaatttggatccaaagaagtcttttcaaggctcacttttattcccagaacggaaagattatcaattctacaaggaatatcccacgatttaccatttgcgaaaggcattgatggaaaaagaccggaagtttgatattcgggaaatttatttagcagtccatcacattattaaatatcggggaaacttcttaaacggaacgccgatgcggtcgtttaaagtagaaaatattgagcttgatacgttatttgaccggttaaaccagctttatgaagagattattcccgacaatgaactggcctttgatttagaacaagtggcggatgttaaggaagttcttagtagcacaactatctataaaatggataagaaaaaacaactagtgaagatgatgctgcttcccgcaagcaacaaggcattacagagtgaaaacaagaaaatcgttacgcagtttgttaatgcgattttgaactataagtttaagcttgacgtgctcctccaagttgaaacggacgcggattggtccttgaagttaaacgacgagggggcggatgataaattagaagaattcacgggtgatttagatgaaaatcgtttggaaattattgatcttttgcaaagactacataactggttttcattaaatgaaattacaaaagatggtaattcgttgtccgcggcgatggttgaaaaatataaagaccaccgtcaccatttagaattattgaaaaaggtaattgaggatcattcagatgccaagaaagcaaaagcactgaaggaaacgtacacggcctacgtcggtaaaacggacgataagacccagaacaaagatgatttctataaggctgtggaaaagaacttagatgattcgccggaagcaaaagaaattaaacgtttaattcagctagaccagttcatgcctaagcaacggactgggcaaaatggggcaatccctcaccaactgcatcaacaggagctcgaccaaattatcgaaaagcaatctaaatattatccgtttttggcggagccgaatccgaacgttaagcgccgtaaagatgctccttacaaactagacgaattgattgcctttaagatcccgtactacgtgggcccattggtaacgccggaagaacaagcacaaaataaagaaaacgtgtttgcgtggatgaagcggaaggctgccggtccaattacaccatggaattttgatgaaaaagttgaccggatggaatccgcaaaccgatttattcggcggatgactaccaaagatacgtatctttttggcgaagatgtcttacctgcggaaagcatgatttacgaaaaatttgtggtgcttaatgagctaaataatttgaaaattaatgggcggcatttatcgcttaaggataagcaagacatttataatgacttgttcaagcaacaaaaaacggtttccattaaagcgctccaaaattactacgttaccaaaaagaaggctgcaaccgcgcctaccgtgggcggattggccgatccaaagaaatttttatcaagtctatcaacttatattgatttcaaaaatatgtttggggagcgggtaaacgatccgcaattccaagaggatttggaacaaatcgtggaatggtcgacaatttttgaagatcggggaatcttcaaggcaaaattacaagccctgggttggctatctgaaaagcagattcaacaactggtggctaaacgttacaaaggatggggccggctttccaagaagctcttaactgggctaaagaacgcggaaggatactcaattttagacgaaatgtggcattcgaccgaaaacttcatgcaaattcaaactcgcccagaatttgcggcactaattcaacaggccaacgaaaagcaatttgagggcaacgacccggataatgtttgggagaatattgaaaacattttgggggatgcgtacacttcaccacaaaataagaaggcaatccgtcaagtggtgaaggttgtccaagatattgaaaaagcagtgggtaacccacctgaaaaaattgcgattgagtttacccgtgaagccgcggcgaaccctcaacggacgcaaagccgtttgcggaccttggaaaaactttatgaaagtgccgaagaagttgtagacgcggggttaactgccgaactagctgaatttaaggaaaataagcacgttttatcggataagtactacctgtactttacccaattaggccgggatgtttatactggggacactattagtctagataggttgaacgattacgatgttgaccacattttgccacaatcctttattaaggatgatagtttggacaaccgggtattgacgattcgagcggttaacaacggaaaaagtgataacgtaccagctaaaatgtttggcaaaaaaatgggttcgttttggcggtacttgctggataacgggatgatttccaaacgaaaatataataacttaattaccgatccggataatatcagtaaatacgcccaaaagggatttattaaccggcaactcgtggaaaccagtcaagttatcaaactgacggctaacattttaaacgggatttacgataaggacaccgaaattatcgaagttccagcgaaaatgaattctcaaatgcggaaaatgtttgatttggttaaggtgcgggaagttaacgactaccaccatgcctttgacgcttatttaactatctttattggaaactatctgtataaatgttatccaaaattacggccatactttgtttatgataattttaaaaagtttggtaacaaggaagatataggacataaacgttttaactttttaggaaaaattgagcgagacaagaaagtggttgctcctgaaactggtgaaatcttgtggtcaaacgtggcaccgaatgagaccatcaagcagattaagaaggtttatgattataaatttatgcttacttctcatgaaacttacactaaacacggtgcgttgtttaatcaaacgatatactctgccaaagcttcaaaaacgatgattccaattaaaaatgaccgacctaccaaactttacggtgggtatagcgggaatgaagatgcatatatgagcattattaggttaagtgacaagaaaaaaacgtacaaagtagttggtatatcaatgcgcgatgctagtaagttgaaagcttatgaaaataatgcgcatgaagaatatctaaaaaaattaaaggaagttattgaacagcaatttttagatagtggcaaaaaaactaaagccgattttgaaattgttattccaaaagttaattatcatcaaagaatgcaggatggcacaaagcaatttagaattggcagttccaaatatgtacacaacactaagcagttagtattatctgagaaaactctaaaagccattcgaaacaataagcaatataacggagatgctgaaaaggatcttattaatgcttttgatgaaatactaactattgttaatgattcgttcagtatttttgatattagaagttttagaaaaaagcttaatgaaagtcgagataagtttgtttctttaccagtagaagatacaaaagaaaaaagcaaagttattaaaggcaagcgggagacgttgaagcagatattgattgcacttcatgcaaacggcacttcacaagacatcccacaactagggcttaaaagttttggaaaaatggttaaaactggggggcttacattatcagaaaatacagccctaattcatcaatcgccatcaggattattcgaacataaaattaaattaagcgatctttaa

SEQ ID NO: 362 - DNA, 4074 bp, Pediococcus parvulus DSM 20332A
atgggtgacagaaagtataaccttggtctcgatatcgggacgtcatcaattggctttgcggcagttgacgaaaataaccaacccattcgagtcaaaggaaagacggcaattggggtacgtctctttgaagagggcaaaacggcggcggatcggcgtggttttcggactacgcggcggagattatcccggcgccggtggcggatcaatttattgaacggaatttttgatgcgcaccttgccgaggtggaccccacctttttggcccggttaaaagaatcgaaccggtcaaatttggatccaaagaagtcttttcaaggctcacttttattcccagaacggaaagattatcaattctacaaggaatatcccacgatttaccatttgcgaaaggcattgatggaaaaagaccggaagtttgatattcgggaaatttatttagcagtccatcacattattaaatatcggggaaacttcttaaacggaacgccgatgcggtcgtttaaagtagaaaatattgagcttgatacgttatttgaccggttaaaccagctttatgaagagattattcccgacaatgaactggcctttgatttagaacaagtggcggatgttaaggaagttcttagtagcacaactatctataaaatggataagaaaaaacaactagtgaagatgatgctgcttcccgcaagcaacaaggcattacagagtgaaaacaagaaaatcgttacgcagtttgttaatgcgattttgaactataagtttaagcttgacgtgctcctccaagttgaaacggacgcggattggtccttgaagttaaacgacgagggggcggatgataaattagaagaattcacgggtgatttagatgaaaatcgtttggaaattattgatcttttgcaaagactacataactggttttcattaaatgaaattacaaaagatggtaattcgttgtccgcggcgatggttgaaaaatataaagaccaccgtcaccatttagaattattgaaaaaggtaattgaggatcattcagatgccaagaaagcaaaagcactgaaggaaacgtacacggcctacgtcggtaaaacggacgataagacccagaacaaagatgatttctataaggctgtggaaaagaacttagatgattcgccggaagcaaaagaaattaaacgtttaattcagctagaccagttcatgcctaagcaacggactgggcaaaatggggcaatccctcaccaactgcatcaacaggagctcgaccaaattatcgaaaagcaatctaaatattatccgtttttggcggagccgaatccgaacgttaagcgccgtaaagatgctccttacaaactagacgaattgattgcctttaagatcccgtactacgtgggcccattggtaacgccggaagaacaagcacaaaataaagaaaacgtgtttgcgtggatgaagcggaaggctgccggtccaattacaccatggaattttgatgaaaaagttgaccggatggaatccgcaaaccgatttattcggcggatgactaccaaagatacgtatctttttggcgaagatgtcttacctgcggaaagcatgatttacgaaaaatttgtggtgcttaatgagctaaataatttgaaaattaatgggcggcatttatcgcttaaggataagcaagacatttataatgacttgttcaagcaacaaaaaacggtttccattaaagcgctccaaaattactacgttaccaaaaagaaggctgcaaccgcgcctaccgtgggcggattggccgatccaaagaaatttttatcaagtctatcaacttatattgatttcaaaaatatgtttggggagcgggtaaacgatccgcaattccaagaggatttggaacaaatcgtggaatggtcgacaatttttgaagatcggggaatcttcaaggcaaaattacaagccctgggttggctatctgaaaagcagattcaacaactggtggctaaacgttacaaaggatggggccggctttccaagaagctcttaactgggctaaagaacgcggaaggatactcaattttagacgaaatgtggcattcgaccgaaaacttcatgcaaattcaaactcgcccagaatttgcggcactaattcaacaggccaacgaaaagcaatttgagggcaacgacccggataatgtttgggagaatattgaaaacattttgggggatgcgtacacttcaccacaaaataagaaggcaatccgtcaagtggtgaaggttgtccaagatattgaaaaagcagtgggtaacccacctgaaaaaattgcgattgagtttacccgtgaagccgcggcgaaccctcaacggacgcaaagccgtttgcggaccttggaaaaactttatgaaagtgccgaagaagttgtagacgcggggttaactgccgaactagctgaatttaaggaaaataagcacgttttatcggataagtactacctgtactttacccaattaggccgggatgtttatactggggacactattagtctagataggttgaacgattacgatgttgaccacattttgccacaatcctttattaaggatgatagtttggacaaccgggtattgacgattcgagcggttaacaacggaaaaagtgataacgtaccagctaaaatgtttggcaaaaaaatgggttcgttttggcggtacttgctggataacgggatgatttccaaacgaaaatataataacttaattaccgatccggataatatcagtaaatacgcccaaaagggatttattaaccggcaactcgtggaaaccagtcaagttatcaaactgacggctaacattttaaacgggatttacgataaggacaccgaaattatcgaagttccagcgaaaatgaattctcaaatgcggaaaatgtttgatttggttaaggtgcgggaagttaacgactaccaccatgcctttgacgcttatttaactatctttattggaaactatctgtataaatgttatccaaaattacggccatactttgtttatgataattttaaaaagtttggtaacaaggaagatataggacataaacgttttaactttttaggaaaaattgagcgagacaagaaagtggttgctcctgaaactggtgaaatcttgtggtcaaacgtggcaccgaatgagaccatcaagcagattaagaaggtttatgattataaatttatgcttacttctcatgaaacttacactaaacacggtgcgttgtttaatcaaacgatatactctgccaaagcttcaaaaacgatgattccaattaaaaatgaccgacctaccaaactttacggtgggtatagcgggaatgaagatgcatatatgagcattattaggttaagtgacaagaaaaaaacgtacaaagtagttggtatatcaatgcgcgatgctagtaagttgaaagcttatgaaaataatgcgcatgaagaatatctaaaaaaattaaaggaagttattgaacagcaatttttagatagtggcaaaaaaactaaagccgattttgaaattgttattccaaaagttaattatcatcaaagaatgcaggatggcacaaagcaatttagaattggcagttccaaatatgtacacaacactaagcagttagtattatctgagaaaactctaaaagccattcgaaacaataagcaatataacggagatgctgaaaaggatcttattaatgcttttgatgaaatactaactattgttaatgattcgttcagtatttttgatattagaagttttagaaaaaagcttaatgaaagtcgagataagtttgtttctttaccagtagaagatacaaaagaaaaaagcaaagttattaaaggcaagcgggagacgttgaagcagatattgattgcacttcatgcaaacggcacttcacaagacatcccacaactagggcttaaaagttttggaaaaatggttaaaactggggggcttacattatcagaaaatacagccctaattcatcaatcgccatcaggattattcgaacataaaattaaattaagcgatctttaa

SEQ ID NO: 363 - DNA, 4128 bp, Pediococcus parvulus DSM 20332B
atggaaaataagaaatatagtatcggcctagatatcggaaccagttcaattggttttgcagtcgtggatgaaaataaccgtgtcatgcgcgtgaaaggaaaaaatgcaattggtgtgcgtttattttctgaagggcaaccagctgcggatcgacgtagtttcagaacaacacgccgtcgcttaagtcgccgtcgttggcgtttacgattattgcgggagatttttgaaccgtacataaatcctgtggatgaagcattctttatgcgattgaaagaatcaaatttgtcaccgaaggatgctaacaagcactactcaggagatattttgtttaacgatcaatcggatcaaaaattttatgaaaagtatcctacaatctatcatttacgtcatgcgctcatgacagaacatcgtaaatttgatgttcgtgagatttatttggcgatccatcatattgtgaagtttcgtgggcattttttaaatgcagcttctgccagtaattttactgttggtaaattgaatttggagggcaaatttgatgctctaaatgaaatttatcaacgcgttttaactgatgatccgtttgcacttagaacggataatttggatcatatcaaagaaatattgattgataacaagcggagtaaggctgatcggcaacgaactttgactggggatgtgtatcaaagttctgaagaaaaagaaattgaaaaacgtaacaaagccattgcaaccgaaatcctgaaagctgcagttggtaataaagccaaattaaatgtgattaccaacgttgaagttgacaaggaagccgctaaagattggtccttaacatttgattcagaaacgattgatgatgaattggccaaggttgatggtcagatgacagacgatggccgtgaaattattgaaattttgcgtagtctatactccgggatcactttggcggcaattgtgccagaaaatcatactttatcacaatcaatggtagaaaaatataattcgcataaggcacatttgaaattattgaaagatttgattaataatatgactgatacgaggaaagctaagaatcttcgtgctgcatatgacggctatattgatggtgtaaagggaaaagttttaactagggatgatttctataaacaaattcaaggtaacttggatgattcagccgaagcacagaaaattcaagatgtgatggatcaagatgaatttatgcctaagcaacgcaccaaagcgaatggttcaattccgcatcaactgcaacaacaggagctggatcagatcgttgaaaatcaaaaggaatactatccttggttagctgaggaaaatccaaatgagacacgccgcggggttgctaaatataagttggatgagttggtcactttccgtgtgccttattatgttggcccaatgattactgccgaagatcaggaaaaacagtctggtgctagttttgcatggatgaaacgaaaagaaccaggaaatattacaccttggaacttcgatcaaaaagtggaccggatggctagtgcaaaccagtttatcaaacggatgacaactactgatacctatttattgggtgaagatgtgctaccggcacagagtttgttatatcaaagatttgaagtgttaaacgaactcaataaaattcgaattgatcgtaagccaatttcgatcgaactcaagcaacagatttttaatgatttgtttaaaaagtttaaaaatgtcacgattaagcatttgcaggagtatttagtagctactggtggctatgataaacgcccgagaattgacggtttagctgatgaaaaacgatttaatagtggactaagtgcttatcatgatttgcatggaattttgggtgcagaggttgttgatgccaatgataaacaagacgatttggaaaagattattgagtggtcgacaatttttgaagataaaaagatttaccgggccaaactagatgagttgacttggctaacggatagtcaaaaagaaaaattagcgactaaacgttatcaaggttggggtcgcttatcaaagaaactacttagtggtctaagaaactcggatcatcgtagtattttagacattttgtggattacgaacgaaaactttatgcaaattcaagcagatccagatttcgctgaacttgtaaaaaatgctaatcaagggatgcttggcaagaataattcacaggatgttattaacgatttatatacttctccacaaaacaaaaaagcaattcgacaaattttattagttgttcatgatatccaaaacgcgatgcatgggcaagcacccgctaaaattcatgtagaatttgcgcgtggagaggaacgtaaccctcgacgttccattcaacgtcagcatcagattgaagcagcatatgataaagtgaccagtgacctcttggtagacgccggtgttcgtcaagagctaaaagatgccattaacgataaacgagattttaaagatcgattattcctgtacttcatgcagggaggtcgtgatatttataatggcgaaccaattaatatagatcgcctttcaagctatgatattgatcatattttgccacaggcctttgttaaggatgattcattaaataatcgtgtgttaactgatgctgagggaaacagacgaaaatcggatgccgttcctagtgagctttttggtgctaagatgcgatcaacctgggaattaatgagagaacaggggttaatttcaaaagctaagtatcgaaatttaaccatgaatcctgagaatattaatgcccatactgaaaatggctttatcaatcggcaattggttgaaactcgacaggtaattaagttagctgttaatattttggctgatgaatatacagaagatacccaaattgtttcagtaaaggcggacctttcccatcagatgcgtgaagactttgaattactgaaaaatcgggatgtgaatgattatcaccatgcgtttgatgcctatttagcggcgtttattggcaactacttgttggaacgttatcctaagttgcagtcatactttgtttatggagatttcaagaagtttagtcaaaaagatacaaagatgagacggtttaactttatctacgatttgaaacatagtgatcagattgcagataagaatggtaaaaaaatatggcacaaaacgaatgatcttgattacattcgtcacttgtttgcatacaaaaagattctgatttcgcatgaagtgagtgaacggcgtggggcactttataatcaaaccgtgtataaagccagtgatgataaggctagtggacaaggttctaagaaattaatcccaattaaagctaataaaccgaccgaaatttatggtggatatactggtaaaacacttgcctacatggcgattgttaaagtgatcaagggtaagaaaattgcatataaagttgtgggggtaccgacttctgctttagttcaattagcaggtattgaacatggatctcaagaggaactaaatcggttatatgacgtacttaaacctcaatttacccaactgaagaaaaacaacaaaactggtgagatttctgaaactgtaagtaaatttgaaatcgttattcctagggtgaagtaccagcagttagtcgaagacgatgataaattgtttatgatcgggagtgatacgtacccgtataatgcacaacaattagtgttgtcagaaggtgcacttaaagtgataaataatgtttatcgaaagggagaaaacagtgataaacaagaaagttataaattggacgatgtgtatgatgaaattataattgccatgaaaaaatattttccactatatgataatcgtggctttagagaaaaagttgcggaaggtaaatcaacatttgaaaatttaccaatatcaaatgaatttaagaatggaaaactaactaaaatagggaaaaaagaggttatcaacaggatgttacagggattacacgctaatgcaacaatgacagatttgaagattttaggtattaaatctccatttggatttatgcaacagccaacaggtattgcattaagtgagaatgctcaactaatttatcagtcgccaacagatttatttgaacggcgagtacaattgaataaaattaagtaa

SEQ ID NO: 364 - DNA, 4146 bp, Pediococcus stilesii DSM 18001
tccgatatagtgagaattgataacggattggaggaattaaaagtgaacaacagaatttataacattggtctcgatatcgggacatcgtcggtcggttttgccgttacagatgctcaagacaaattggttcgagtgaaggggaaaacggcaattggcgtacgtctttttgaagaaggacataccgcagctgaacgccgtggatttcgaacaactcggcggagactatcacgccgaaaatggcggattaatttgttaaaccaaatttttgagccatacatatcagagattgatccaactttttttgcgcgtttaaagaattcaagtttagcgggaaaagataaaaaattcgaaggatcattattatttccggatcgaacggactatcagttttataaagataacccaacaatgtatcatttacgcaagcacttaatggagaaagatcgtcaatttgatctacgtgaaatttatttagcgatgcatcatataattaaatatcgggggaattttctgaatacgaccccaatgaatcattttaaaaatgaagaaattgactttagtgcacttttttcaagactaaacgaattgtatcaggaaattgacgatgaaaatatttttgaactgaacattgaaaatgtcgatgaaattaagaagatccttttaaatcatgatctttttaagatggaaaaacaaaaacaagtcgctaaattactgaacgttgataccgatgataaacaattgaaaaaagaaaataccgctttggcaagtaattttagcaaggcgattttgggatataaatttaatttagcgttagtgacaaaaattcctgatcaagataaaaaagaatggacgattagcttaggggatgaagattttgatgatcgcttggacaatgtgcctgtagccttgactgaaagccaacttgaagtggttgaagttttacattcaatttttaacagtatctcattgaatgaaattgttgaaaacggagaaacattatcttctgcaatggttaggaagtataacgatcacaagcacgacttaaaattgttgaagaacgtgatgaccactttagaagatcggaaaaaagctaaaaaaattcaaggaatttataatgtctttgttggtaaagacacggaccttatttcggataaagataagaataaatataaggataaagatgagttttataaagaaattcaaaaaaatcttgataattctagtgatgcagaagaaattattaaacgaattaaacaagatcaatttcttccaaaacagcgaacatctaaaaatggagttatcccacaccaattgcatcaacgagaattagatttgatcattgaaaaccaagcaaaatattatccttttttaaaggaagcaaatccaaacaagaagcgattaaagcaggcaaaatataaattagacgaattaatcgcgtttaaaattccttattatatagggcctacatcgggtgctgaaaattctgatttttcgtggttaaaacgaaaaaaagatgggcagattactccttggaactttgacgaaaaggttgaccgcatcgagtccgcaaaccgatttatccgacgcatgactaccaaagatacatacttattagctgaggatgttttaccacttgaaagcctaatttacgaaaaatatagtgttttaaacgaattaaacaacgttcggatcaacagacagaagttgagcgttaatgataaacaagatatttataatgaactgtttaagaatagtaaaacggtcaccctaaaacagttacaaaaatattttgaagtaaccaagaagttaaaaacggtggtagtagagggattggccgatcctaaaaaatttctttcaaatttaggaacgtatcatgattttaaactaatatttggtgacatcgttgatgatccagaatatcaaacggatcttgaaaacattatcgaatggtcgacgatctttgaagaccgtggaatttttaatagcaaattaaacgaaattacttggcttactgatgagcaaagaaaaaaagttttatctaaacgttatcaagggtggggtcgattctctaaaaagctgttagttgggttaaagaattcgcaaggaaactcaattttagacgagctttggaatacgaaccttaatttcatgcagctacagagtcaagacgattttgccgaattaattcatgcagaaaatgcaaaacaatttaaagcaaacgatcccgataatccttggaatggaattgatgccattttaaacgacgcctatacttcaccacagaataaaaaagcaatccgacaagttgtgaaggttgttcaggatatcgaaaaggcaatgggaaacaaacctcagaaaattgcaattgaatttacacgctcggctgataaaaatcctcgaagaacggatagtcgaattaagcggctgtctgatatatataaagaggcggccgagaaagttgtcggtgaatctttaaagttagagttaaatgaatatttaacttctaagaaaaaaatgacggataaaatgtatctttattttactcagttgggaacggatatttatacgggaaagaagattgacattgatcagttaaataattacgatatcgaccatgttttgccacagtcatttttaaaagatgactccttggacaatcgagtcttaacaaacagaagtgataatagtgagaagagcgatacagttccgctgcataaatttggcgcaaagatgggtaatttttggcggcaacttgctgatgaaggattgattaccaaacgaaagtacaagaacttgactaccgacccagccacaattgataaatacacaatacaagggtttatcaggcgtcaattggtggaaacaagccaagttattaagctgaccgcgaatattctgggaggattatatccagaagaaacagaaattttagaaatacctgccaaactaaaccaccagttccgggatatgtttgatttagtgaaggtgcgggaagtaaatgattaccatcatgcttttgatgcttatataacagtatttgtcggaaattttctttacagaagatatcctaaattaaggtcgtactttgtatatggtgactttaaaaaattaaataaaaccgatgacgatattcgaaagtttaattttttgaatttatttaataaagataaagttgaggataatgaaacggacgaaatcctttggtctaaagcggaatcgataagggacattaagaacatttataattacaagtttatgttagtttcgagggaagtttacactaggcacggggcaatgttcaatcagacaatctatcccgcctcgaaaaatgattcaaaaaaattaattccaattaaaaagggcaaggatactgcaatttatggcggatacagtggaaatactgacgcctatatggcaatcgttgctgttgaagacaaaaagggcgagaaattcaaagtggtcggcgttccgacacgggcggttagccgattagaacaattagcagccgatgatcacgatcagtatcttacggcactccatgatgtgttgaagccaaatttcacgaagattaaaacaaatcgaaaaactaaagcgaaggaagaagtgacaacaccattccgaattttagttggaaaagttggttatcgtcaattaattcaagatggtcaggtaaaaatgatgctgggaagctcagcttataaatataatgctaaacaattggtgctttcggaaaaatctttaaaagttattaaaaacaataaaaagtataatcctgatgatgaaaatcaagatttaattgatgtttacgatgagatattgggagtggttaatcgagcgtttaatttatatgacacgaacggctttagaaagaaattgaatgataatagagtgaagtttgttgaattaccaatcaataatatatttgatggtacaaaattagttcaaatgggtaaaagagcggttttgacgcaaattttaaatggcttacacgcaaatgcggcgcttggtgatctgaaggctttgggtatctcaacgccgtttggaaagatgcagagcaaaagtggtattccattatcgatggacgcttctttggtttatcaatcaccaactggactttttgaaagaaaactaaatttaagcgatctt

SEQ ID NO: 365 - DNA, 4113 bp, Steptococcus agalactiae GB00300
atgaataagccgtattcaataggccttgacatcggtactaattccgtcggatggagcattattacagatgattataaagtacctgctaagaagataagagttttagggaacactgataaagaatatattaagaagaatctcataggtgctctgctttttgatggtgggaatactgctgcagatagacgattgaagcgaacagctcgtcgtcgttatacacgtcgtagaaatcgtattctatatttacaagaaatttttgcagaggaaatgagtaaagttgatgatagtttctttcatcgattagaggattcttttctagttgaggaagataagagagggagcaagtatcctatctttgcaacattgcaggaagagaaatattatcatgaaaagttcccaacgatttatcacttgagaaaagaattggctgacaagaaagaaaaagcagaccttcgtcttgtttatctggctctagctcatatcattaaattcagagggcatttcctaattgaggatgatagatttgatgtcaggaatactgatattcaaaaacaatatcaagcttttttagaaatctttgatacaacttttgaaaataatgatttgttatctcaagatgtagacgtagaggcaattctaacagataaaattagcaagtctgcgaagaaagatcgtattttagcgcagtatcctaaccaaaaatctactggtatttttgcagaatttttgaaattgattgtcggaaatcaagctgacttcaagaaacatttcaatttggaggataaaacgccgcttcaattcgctaaggatagctacgatgaagatttagaaaatcttcttggacagattggtgatgaatttgcagacttattctcagcagcgaaaaagctatatgatagtgttcttttatctggcattcttacagtaacagatctcagtaccaaggcgccactttctgcctctatgattcagcgttacgatgaacatagagaggacttgaaacagttaaaacaattcgtaaaagcttcattgccggagaaatatcaagaaatagttgctgattcatcaaaagatggctacgctggttatattgaaggcaaaactaatcaagaagcattttataaatacttgtcaaaattgttgaccaagcaagaaggtagcgagtattttcttgaaaaaatcaagaatgaagattttttgagaaaacaaaggacctttgataatggctcaattccacaccaagtccatttgacagaattgagggctattattcgacgtcaatcagaatactatccattcttgaaagagaatctagataggattgaaaaaatccttacctttagaattccttattatgtcgggccactagcacgtgagaagagtgattttgcatggatgactcgcaaaacagatgacagtattcgaccttggaattttgaagatttggttgataaagaaaaatctgcggaagcttttatccatcgtatgaccaacaatgacctctatcttccagaagaaaaagttttaccaaagcatagtcttatttatgaaaaatttactgtttacaatgaattaacgaaggttagatttttggcagaaggctttaaagattttcaatttttaaataggaagcaaaaagaaactatctttaacagcttgtttaaggaaaaacgtaaagtaactgaaaaggatattattagttttttgaataaagttgatggatacgaaggaattgcaatcaaaggaattgagaaacagtttaacgctagcctttcaacctatcatgatcttaaaaaaatacttggcaaggatttccttgataatacagataacgagcttattttggaagatatcgtccaaactctaaccttatttgaagatagagaaatgattaagaagcgtcttgacatctataaagatttttttacagagtcacagcttaaaaagctctatcgccgtcactatactggctggggacgattgtctgctaagctaataaatggcatccgaaataaagagaatcaaaaaacaatcttggactatcttattgatgatggaagtgcaaaccgaaacttcatgcagttgataaaagatgctggtctatcatttaaaccaattattgacaaggcacgaactggtagtcattcggataatctgaaagaagttataggtgaacttgctggtagccctgctattaaaaaagggattctacaaagtttgaaaatagttgatgagctggttaaagtcatgggctatgaacctgaacaaatcgtggttgaaatggcacgtgagaaccaaacgacagcaaaaggattgagtcgttcacgacaacgcttgacaaccttaagagaatctcttgctaatttgaagagtaatattttggaagagaaaaagcctaagtatgtgaaagatcaagttgaaaatcatcatttgtctgatgaccgtcttttcctatattaccttcaaaatggtaaggatatgtatactgatgatgagcttgatattgataatttaagtcaatatgatattgaccacattattcctcaagctttcataaaagatgattctattgataatcgtgttttggtatcatctgctaaaaatcgtggaaagtcagatgatgttcctagccttgaaattgtaaaagattgtaaagttttctggaaaaaattacttgatgctaagttaatgagtcagcgtaagtatgataatttgactaaggcagagcgcggaggcctaacttccgatgataaggcaagatttatccaacgtcagttggttgagacacgacaaattaccaagcatgttgcccgtatcttggatgaacgctttaataatgagcttgatagtaaaggtagaaggatccgcaaagttaaaattgtaaccttgaagtcaaatttggtttcaaatttccgaaaagaatttgtattctataaaattcgtgaagttaacaattatcaccatgcacatgatgcctatcttaatgcagtagttgctaaagctattctaaccaaatatcctcagttagagccagaatttgtctacggtgactatccaaaatataacagttacaaaacgcgtaaatccgctacagaaaagctatttttctattcaaatattatgaacttctttaaaactaaggtaactttggcggatggaaccgttgttgtaaaagatgatattgaagttaataatgatacgggtgaaattgtttgggataagaagaaacattttgcgacagttagaaaagtcttgtcataccctcaggtcaatatcgtgaagaagacagagattcagacaggtggtttctctaaggaatcaatcttggcgcatggtaactcagataagttgattccaagaaaaacgaaggatatttatttagatcctaagaaatatggaggttttgatagtccgatagtagcttactctgttttagttgtagctgatatcaaaaagggtaaagcacaaaaactaaaaacagttacggaacttttaggaattaccatcatggagaggtccagatttgagaaaaatccatcagctttccttgaatcaaaaggctatttaaatattaggactgataaactaattattttgcccaagtatagtctgttcgaattagaaaatgggcgtcgtcgattacttgctagtgctggtgaattacaaaaaggtaatgagctagccttaccaacacaatttatgaagttcttataccttgcaagtcgttataatgagtcaaaaggtaaaccagaggagattgagaagaaacaagaatttgtaaatcaacatgtctcttatttcgacgatatttttcaaataatcaatgatttttcaaaacgagttattctagcagatgctaatttagagaaaatcaataggctttaccaggataataaggaaaatataccagtagatgaacttgctaataatattatcaatctatttacttttaccagtctaggagctccagcagcttttaaattttttgataaaatagttgatagaaaacgctatacttcaactaaagaagtacttaattctaccctaattcatcaatctattactggactttatgaaacacgtattgatttgggtaagttaggagaagattga

SEQ ID NO: 366 - DNA, 4113 bp, Steptococcus gallolyticus ATCC BAA-2069
atgactaagaaaaattattcaatcggacttgacataggtactaatagcgtaggttgggctgtgattactgatgattacaaagttccagctaaaaagatgaaagttttaggaaatactgataaaaagtatatcaagaaaaacttactaggtgcattgttatttgacagtggcgaaacagctgaagcgactcgtttgaaacgtactgctcgtcgtcgttacacacgccgtaaaaatcgtttgcgttacctacaagaaatttttgcggaagaaatgactaaagttgacgaaagcttcttttatcgtcttgacgaatcatttttgacaacagatgaaaaagattttgaacgtcatccaatttttggcaataaagcagaagaagatgcctatcatcagaaattccctacaatttaccatttaagaaactatcttgcagattcatctgaaaaagcagatttacgtttggtttatctagctttggcacacatgattaaatatcgtggacatttcttaattgagggaaaattgaatgccgaaaatacagatgttcaaaaactatttactgatttcgtaggagtgtatgatagaacatttgatgatagtcacttatcagaaattacggttgatgttgcaagtactttgacagaaaaaattagcaaatcacgtcgtttagagaatcttattaaatactacccaacagaaaagaaaaatactttatttggaaatcttattgctttggctttaggattacagcctaattttaaaatgaatttcaaattatctgaagatgctaaattgcaattttctaaagatacctacgaagaagatttagaagagttacttgggaaaattggagacgattatgcagatttatttacttcagctaaaaatctttatgatgcaatcttactttcaggtatcttaactgttgatgataattcaactaaagctcctttatcagcttcgatgattaaacgttatgttgaacaccatgaagatttagaaaagctaaaagaattcattaaggcaaataaatctgagttgtatcacgatatttttaaagataaaaacaaaaatggttatgcgggctatattgaaaatggtgtcaagcaggatgaattctataaatatttaaaaaatactctctctaaaattgatggaagtgattatttcctagataaaattgaacgtgaagatttcttaagaaaacaaagaacatttgataatggttcgattccgcaccaaattcatctccaagaaatgcatgcaattttgcgccgtcaaggtgattattacccatttctaaaagagaagcaagatagaattgaaaaaatcttgacttttagaatcccttactatgtcggaccattagtgcgaaaagatagccgatttgcatgggcagaatatcgttcggatgagaagattacaccgtggaatttcgataaggtaatcgataaagaaaaatcagctgaaaaattcattacacgcatgactttaaatgatttgtatttaccagaagagaaagttctaccaaaacacagtcatgtatatgaaacatatgcggtttataatgaattaaccaaaattaagtatgtcaatgagcaaggaaaagaatctttctttgattcaaatatgaaacaagaaatctttgaccatgtctttaaagaaaatcgtaaagttaccaaggaaaaacttttaaattaccttaataaagaatttcctgaatatcgtattaaagatttaattggacttgataaagaaaataaatctttcaatgctagtcttggaacttaccatgatttgaaaaagattttggataaagctttcttggatgataaagtaaatgaagaagttattgaagatattattaaaacgttaactttgtttgaagataaagatatgatccatgaacgtcttcaaaaatatagtgacatttttacagctaatcaattgaaaaaacttgaacgacgtcattatactggttggggacgtttgtcatataaattaattaacggtatccgtaataaagaaaataataagaccattcttgattatctgattgatgatggttctgctaatcgtaactttatgcagttaattaacgatgatacattaccatttaaacaaatcatccaaaaatcgcaagttgttggtgatgtcgatgatattgaagctgttgttcatgatttacctggaagtcctgctattaaaaaaggtattctacaaagtgtcaaaatcgttgatgagctagttaaagtgatgggagataatcctgataatattgttattgaaatggcgcgtgaaaatcaaacaactaatagaggaagaagccagtcccaacaacgtttgaaaaaacttcagagctcattaaaagagttaggaagtaatattcttaatgaggaaaaaccgtcatatattgaagataaggttgaaaatagtcatcttcaaaatgatcaactcttcctttactacattcaaaatggtaaagatatgtacactggtgatgagttagatattgaccatctaagcgattatgatattgaccacattattcctcaagcctttattaaggatgactctattgataatcgagtactaacaagttctgctaaaaatcgaggtaaatcagatgatgtaccaagtcttgatattgttcgtgctagaaaggcagaatgggttcgattgtataaatcaggactaatctctaaacgtaaatttgataatttaacgaaagccgaacgtggtggattgactgaagcggataaggctggatttattaaacgtcaattggttgaaacacgtcaaatcacaaaacatgtggcacaaattttagatgctcgttttaatacagaacatgatgaaaatgacaaggtgattcgtgatgtgaaagtcattactttaaaatcaaatctggtttcacaattccgaaaagattttgaattttacaaagttcgtgagatcaatgattatcatcatgctcatgatgcttatcttaatgcggttgttggaacagcattattgaaaaaatatcctaaattagcttctgaatttgtttatggtgagtacaagaaatatgatattcgtaaatttatcactaattcaagcgataaagcaacagcgaaatatttcttctattcaaatttgatgaatttctttaaaactaaggttaaatatgcggatggtactgtctttgaacgacctattatcgagacaaatgctgacggtgaaattgcttggaataagcaaattgactttgaaaaagttcgaaaagttttatcctacccacaagtcaatattgttaaaaaggttgaaactcagacgggaggattctcaaaagaatcaattttacctaaaggtgactctgataaattaattccacgaaagacaaaaaaagtttattgggatactaaaaaatatggtggttttgatagtccaacagtagcttattctgtttttgttgtagctgacgtcgaaaaaggtaaagctaagaaattgaaaactgtaaaagagctagttggtatttctatcatggaacgttctttctttgaagaaaatccagttgaattcttagaaaataaaggatatcacaatattcgagaagataaattaataaaacttccaaaatacagtctttttgaatttgaaggtggaagaagacgcttgttagctagtgcttcagaacttcaaaaaggaaatgaaatggtgcttccaggatatttagtagaattgctttatcatgctcatcgagctgataattttaatagcactgaatatttaaattatgttagtgagcataagaaagaatttgaaaaagttttatcttgtgtggaagactttgctaacttatatgttgatgttgaaaaaaatttaagtaaaattagagcagttgcagatagtatggataacttctcaattgaggaaatttcaaattcatttattaatttattaacactgactgcattaggtgcgccggctgatttcaatttccttggtgaaaaaattccacgtaaacgctatacctcaacaaaggaatgcctgactgccacccttatccaccaatctatcactggtctttatgaaacacgtattgatttgagtaaattaggagaagagtaa

SEQ ID NO: 367 - DNA, 3387 bp, Steptococcus mutans NLML5
atggctaatagtaaaattttaggtttggatattggcattgcttccgtaggtgttggaattattgataaggaaacgggtaagattattcatgttaattcacgaatttttccggcagctacagctgatagtaatgttgaaagacgaggatttcgtcaaggacgtagattagttcgccggaaaaaacatcgtaaagttaggctggcagatttgtttcttgactcaaatcttttaacggacttttctaaagtatcccttaacttgaatccttatcaactacgtgttaaaggattaaatgaagaattaagtaatgaagaattgtttattgctttaaaaagcatagtcagccgtagaggaataagttatcttgatgatgctagcgaagatagcggagctaattcttcagaatatggaaaagctgtggaagaaaatcgaaagctgcttgaagataggactcctggacaaatccaattggaacgctttgagaaatatggcaaagttcgtggggattttacagttgttgaaaatggggagaatcatcgtttaattaatgtattttctacttcagcctacaaaaaagaagcagagcgaattcttagaaggcaacaagaattcaatattaggattgcagatgaattcattgaagcttatttaactattttgactggcaaaagaaaatattatcatgggcctggaaatgaaaaatctagaacagattacggaagatttcggacagatggcacaactcttgataatatttttggtattttgattgggaaatgcactttttatcctgatgaatatcgggctgcaaaagcttcctatacagctcaggaattcaatttactcaacgatttaaacaatttaacagtaccgacagagactaagaagttaagtgaagaacaaaaacgacagattattgaacatgcaaaaactgtaaaaactttaggggctccaaccttattgaaatacattgctaagttggttggctgctctgctgacgatataaaaggctatcgaattgataagtccgataagcctgaaatccatacttttgaagcctatcgtaagatgcggaccatggagttaatcaaggttgctgacttatcacgtgaaagcttagatgcacttgctcatattcttacgcttaatacagaacgagagggtattgaagaagctatcagagacagatttactaataaagagtttaatcaggaacaaattaatgaactggttctgtttaggaagaataacagttctttatttggaaaaggatggcacaatttttcacttaagttgatgaaggaactgattccagagctttatgagacttctgaggaacaaatgacaattctgacaaggcttggaaaacagagagtgaagaaatcttctaatagaaccaactatattgatgaaaaggaattgactgaagaaatctataatccagtagttgctaaatcagttcgccaggctattaagattatcaatcttgccacaaaaaaatatggtgtttttgataatattgttatagaaatggcgcgtgaaagcaatgaagatgatgagaaaaaagcgattcagaatgctcaaaaagcaaatgaagatgaaaaggaagcagccttgttaaaagcggctcatcagtttaatggtaaagaagagctcccagacagcattttccatggacacaaagaactgttgacaaaaattcgtctctggcatcagcaaggcgaaaagtgtctttatactggaaagactatattcattaatgacttgattcacaatccttataaatatgaaattgatcacatcttacctctatcactatcatttgacgatagtctggcaaataaagttttggtcctctccactgccaaccaagagaaaggtcaacgaactccgttccagtctctagatagtatggatggtgcttggacttatagagagttcaaagcctatgtaaaaggattaaaaacactgagcaataaaaagaaagattatcttctaaatgaggaagatattaataagaatgaggtcaaacaaaaattcattgaacgaaatttagttgatactcgctattcatcacgtgttgttctgaatactttgcaagatttctacaaaaaaagagaatttgatacaaagatctctgttgttcgtggacagtttacttcccaaatcaggagaaaatggcggattgagaaaacacgggaaacttatcatcatcatgctgtcgatgctttgatcatcgcagcatccagtcagctcaatctttggaagaagcaaaataaccctctaatttcctacaaggaagatcagtttgtagatccagaaactggtgagattctttctctgtcagatgatgaatataaggaattagtatttaaggctccctatgatcactttgtggatacattgaaaagtaagaaatttgaagatagcattctcttttcttatcaggttgattctaagtataatcgcaagatatcagatgctactatttatggcacgagaaaagctcgacttgggaaagatagccaagaagaaacttatgtacttggaaaaattaaggatatctattctcaaaaaggctatgaagactttatcaagaagtataagaaagataaaactcagtttttgatgtaccataaggacccacaaacgtttgaaaaggttattgaagaaattctcaaaacctattcggacaaagagttgaacgaaaaggggaaagaagttccttgcaatccttttgaaaaatatagacaggaaaatggacctgttcgtaaatacagtaaaaaagggaatggcccggaaattaagagcattaagtattatgacaataaactcggcaatcatattgatattactccaaataatagtcatcatcaggttgttttgcagtctttgaaaccttggcgaacagatgtttattttaatcctaagtcaggtaagtatgaactgatgggactaaagtattcagatttacgatttgaaaaagtaagtggagattatggcatttcggttaaaaaatataatgaaatcaaatcaaaagaaggagtcgacgagaattcagaatttaaatttaccctttataagaacgatttgattttgattaaagatactgaaagtggagaacaggagttgtttagattcttgtccagaacgatgccaaatcaaaaacattatgttgagttaaaaccttatgataaatctaagtttgaagggcatcaaaaattaatggacatatttggagaagttgctaaaggcggtcaatgcctcaaagggctaaacaagtccaacatctccatctacaaggtcaaaacagatgttcttggtaataaatatttcattaaaaaagagggtgatcagccacagctcaattttaagaaaaaaatctaa

SEQ ID NO: 368 - DNA, 4123 bp, Steptococcus oralis SK304
atggaaaacaaaaattactctatcggactcgatatcggaactaacagcgtcggatgggccgtcattactgacgattataaagttccatcgaaaaagatgaaagttctgggtaataccgataaacgatttatcaagaaaaatctcatcggggctctattgtttgatgagggaactactgctgaggctagacgccttaaacgaactgcacgtcgtcgctatacccgccggaaaaatcgtcttcgctatcttcaagaaatctttgctgaggaaatgagcaaggtagatagtagtttctttcatcgattggatgactcctttttaattcctgaggataaaaaagggagtaaataccctatttttgctaccttgatagaagaaaaagaatatcataagcaattcccaactatttatcatttgagaaagcaattagcagattcaaaagaaaaaactgacttgcgattgatttatctagcattagctcatatgattaaatatcgcgggcattttttatacgaagatacatttgatattaaaaacaatgatatccaaaaaatctttaatgaatttataagcatttacaacaacacctttgaaggaaattcgcttagtggacaaaacgtacaagtagaagcaatttttactgataaaattagcaaatctgcaaagagagaacgcgttctaaaactctttcctgatgaaaaatccactggtctcttttcagaatttctcaagttaattgtaggaaatcaggctgattttaaaaaacattttgacttagaagaaaaagctccactacaattctctagagatacctatgatgaggatttggaaaacttactcggacaaattggagatgactttgcagaccttttcgtggccgctaaaaaactctatgatgcgattcttctatcaggcattttgactgtcacagatccttcaaccaaggctccactgtcagcatctatgattgagcgctatgaaaatcaccaaaaagacttagccactttaaaacaattcatcaaaaccaatcttccagaaaaatatgatgaagtcttttctgaccaatctaaagatgggtatgctggatatatcgatggcaagaccacacaagaatccttttacaaatatatcaaaaatcttctctctaaattcgaaggagcagattatttccttgagaaaattgaacgtgaagattttttgagaaaacaacgtacctttgataatggttctattcctcatcaaattcatcttcaagaaatgaatgccattctccgtcggcaaggagaacattatccattcctgaaggaaaacaaagaaaagattgaaaaaatcttaaccttccgtatcccttactacgtcggcccattagctcgtggcaatcgtgattttgcttggctgactcgaaattctgaccaagcaatccgaccttggaatttcgaagaaattgttgataaagcaagctctgcggaatccttcatcaataaaatgactaactatgacttgtatctcccagaggaaaaagttttgcctaagcatagtctgttgtatgaaacatttgctgtctacaatgaattaacaaaagtaaaatttattgcagaaggattgagagactatcaattccttgatagcaggcaaaagaaagatattttttatactctttttaaggccgaggataaaagaaaagtaaccgaaaaagacatcatccagtatctacatactgttgatggctacgatggaatcgaactaaaaggaattgaaaaacaatttaacgctagtctttctacttatcatgatttactcaagattatcaaggataaagagtttatggatgaccctaataatgaagagattcttgaaaatatcgtccatacgctaactatctttgaagatcgtgagatgattaagcaacgccttgctcaatatgactctctctttgatgagaaagttattaaagcactaactcgtcgacattatactggttggggaaaactctcttctaagctaattaacggtatccgcgataaacaaactggcaaaacgattcttgattatctaatggatgatggctacaacaatcgtaactttatgcagttaatcaatgatgacgagctttctttcaaagaaattatcaaaaaagcacaagtggttggtaagacagatgatgtgaaacaagttgttcaagaacttccaggaagccctgccattaaaaagggaattttacaaagtatcaagcttgttgatgaacttgtcaaggttatgggacacgaacctgagtccattgtgattgagatggcacgagaaaatcagacaactgccagagggaaaaagaattcccaacaaagatataagcgaattgaagattcgttgaaaatcttagcatctggtcttaacgccaaaattctaaaagaacatccaacagataatattcaacttcaaaatgatcgtctcttcctctactatctccaaaatgggagggatatgtatactgggaaacctcttgacatcaaccaactgagcagctatgacattgaccacatcgtcccacaagcctttatcaaggatgattctcttgataaccgtgtcttgacgagtttaaaggataatcgtggcaaatctgataatgtcccaagtcttgaagtagttgaaaagatgaaaactttttggcaacaattgttggattccaaattgatttcttaccgtaaatttaataatttaaccaaagctgaacgcggcggactagatgagcgagataaagttggttttattaaacgccaactagttgaaacacgtcaaatcacaaaacacgttgctcagatcttagatgctcgctataatacagaagtgaatgagaaggataagaagaaccgtaccgtcaaaatcatcactttgaaatccaacctggtttccaacttccgtaaagaatttaggttatacaagatacgggaaatcaacgactaccaccatgcacatgatgcctatttaaatgcagtggttgctaaggctatccttaagaaatatcctaagctagagcctgaattcgtctatggtgactatcaaaagtacgatcttaagagatacatctcaagatccaaagaccctaaagaaatcgaaaaagcaactgaaaagtatttcttctactcaaacttgttgaacttctttaaagaagaggtgcattacgcagacggaactatcgtaaaaagagagaatatcgaatactccaaagataccggagaaatcgcttggaataaggaaaaagatttcgctacaatcaaaaaagttctttcacttccgcaggtgaatattgtgaagaagcgagaggtgcaaacaggtggcttctctaaagagtccattcttcctaagggaaattctgataagctaatccctcgaaaaacaaaggatattctttgggacactactaaatatgggggatttgatagtccggttatcgcctactcaatcttgctcattgccgatatcgaaaaaggaaaagcaaaaagactgaagactgtcaaaactctagttggtatcacgattatggaaaaagccacttttgagaagagtcctatagctttccttgaaaataaaggctatcataatgtccgtaaagaaaatatcctctgcctacctaagtatagtttatttgaactgaaaaatggtcgcagacggatgttagcaagtgcgaaagaacttcaaaaaggcaatgaaatcgtgcttccagtacatttaacaaccttgctctaccatgctaaaaacattcatagactagacgagccagaacatttggaatatattcagaaacaccgaaatgaatttaagggtttattaaatcttgtatctgagttctcccaaaaatatgtcctcgcagatgcaaatctagagaaaatcaagaacttatatgcagacaatgagcaggcagatatagaaatcctagcaaattcgtttatcaatttgttgacctttactgctttgggtgctcctgctgcctttaaattttttggcaaagatgttgatcgaaaacgatacacaactgtatccgaaatcctcaacgccaccctcatccaccaatccatcactggtctctacgagactcggattgacttgagcaaactaggagaagactaat

SEQ ID NO: 369 - DNA, 3378 bp, Streptococcus anginosus 1_2_62CV
atgaacggtttggttttaggattggatatcggtattgcttctgtcggagtgggaattttaaataaagaaacaggcgagattattcatgctaattcgagaatttttccagctgcaactgcagacagcaatgtagaacgtcggggatttagacaaggaagaagacttggtcgaaggaagaaacatcgcagcgctcgcttaaacaacctttttgaagaattcggttttataacagatttttctgctatccctttaaatttaaatccttatgctctgcgtgtgaagggattaagcgaagaattaacaaatgaagagttgtttattgcgcttaaaaacattattaaacggcgtggtatcagctatctagacgatgctagtgaagatggagaaacagcttccaatgagtatggaaaagcagttgaagaaaacagaaaattacttgcagacaaaacgcctggacaaatccagttggaacgttttgaaaaatacggacaagttcgtggggattttacagttgttgaaaatggggagaatcatcgtttaattaatgtattttctacttcagcctacaaaaaagaagcagagcgaattcttagaaggcaacaagaattcaatgtgaggatttcagatgaattcattgaagcttatttaactattttgactggcaaaagaaaatattatcatgggcctggaaatgaaaaatctagaacagattatggaagatttcggacagatggcacaactcttgataatattttcggtattttaattggaaaatgtactttttatcctgatgaatatcgagcagcaaaggcgtcttataccgcgcaggaatttaatttgctcaacgacctcaataatttaacagttccaactgaaacgaaaaaattgagtccagaacaaaagcggcagattgttgagtatgctagaactgcaaaaactttaggaactccaactttactgaaatatattgctaagttagtagacggttctattgatgacataaaaggatatcggattgataaatctgataaaccggagatgcatacttttgacgcctatcgtaaaatgagaacactagatctggtgaatatagatgcattatcgagagaaaccttagacgacttagcacacattctaaccttgaatacagaaagtgaaggtattttagaagctcttaacagtaaaatgcctagtacatttaccaaagagcagattgatgagttaattcagtttaggaagaaaaacagtgcggtatttggaaaaggttggcataatttttctcttaagttaatgaatgaattgatttcggagctttatgagacttcagaggagcaaatgactattttgactcgtctaggtaaacagagaagtagagaaatttcaaaacgaactaaatacatagatgaaaaagaattaacagaagaaatctataaccctgtagtagcaaagtctgtcagacaggcaataaagataatcaatgaagcaactaaaagatatggtatttttgataatatcgttatcgaaatggctcgtgaaaataacgaagaagatgcaaagaaagattatatcaagcgtcaaaaagcaaaccaagatgagaaaaatgcttctatggaaaaagcggctttccaatacaatggaaaaaaagagttaccagatagtatttttcatggccataaggaattagctactaagattcgtttatggcaccagcagggagaacgctgcctttatacgggaaagaatatctctattcgtgatttaattcataatccacatcagtatgaaattgatcatattctgccgctttcactttcttttgatgatggcttggccaataaggttctggtgctagcaacagctaatcaggaaaagggacagagaacaccattccaggctatagatagtatggatgatgcgtggtcttacagggagttcaaacaatatgtccggaattctaaaagcttaagtaataagaaaaaagactatctgctgaccgaagaagatatcagcaagattgaagtaaaacaaaaattcattgagcgcaatctcgtggacacacgttactcatcacgggtagtcctaaatactttgcaggaattttacaaaacaaatgatttcgatacaaaaatttcggttgttcgtggtcaatttacatcacagctgagaagaaagtggaaaattgaaaaaagtcgtgatacctatcaccaccacgcagtagatgctctcatcattgcggcctccagtcagttaagactctggaaaaagcagaataatcctttgatttcttataaagaagggcagtttgtagatcctgaaacgggagagattctttcactgacagatgacgaatataaagaacttgttttcagaccaccatatgattattttgtagatacattgaagagcaaatcgtttgaagacagtatcttgttttcttatcaagtggattctaaatataaccgaaaaatatcagatgctacaatctatggaactagaaaagctcagttggggaaagataagcaggaggaaacttatgtacttggaaaaattaaggatatctattctcaaaagggttatgaagattttatcaagagatataataaagatgaaactcagttcttgatatatcacaaagatccacagacctttgaaaaagttattgaagaaattcttaaaacctatcctgacaaagagttaaacgaaaagggtaaagaaattccctgcaatccttttgaaaagtacagacaagaaaatggtcctattcgaaaatacagcaaaaagggcaaaggcccagagattaaaagccttaagtattatgataataaacttggtaatcatattgatattactcctgtaaacagtcagaaccaggttgttttgcagtccttgaagccttggcggacagatgtttattttaatccccggacttccaaatatgaattgatgggattgaaatactcagatttaagatttgaaaaagggagtggaagctacggtatttcacctgaaaaatataataaagtcaaagcaaaagaaggagtgaacgaggattcagaatttaaatttactttatataagaacgatttgattttgataaaagacaccgaaactggagagcagcaattatttaggtatggttcgcgaaacgatacctcaaaacattatgttgagttaaaaccttatgaaaaagctaaatttgaaggaaatcaacagctgatgaatttgttaggaaccgttgcaaaaggtggtcaatgcctcaaagggataaacaagcctaatctctccatctataaagtcaaaacagatgttcttggtaataaatatttcattaaaaaagagggtgatcagccacagctcaattttaagaaaaaattttaa

SEQ ID NO: 370 - DNA, 4191 bp, Streptococcus anginosus DSM 20563
atgactaaaccatactcaattggcctcgatattggtaccaacagtgtaggttgggctgtgattactgatgactataaagttccagctaagaagatgaaagttttagggaatacaaatcgagattatatcaagaaaaatcttttaggtgcccttttgtttgatgggggagaaacagctgagggaagacgcttgaaacggactgctaggcgccgttatactcgccgaaaaaatcgtctacgctatttgcaagaaatttttgctgaggaaatgatgcaagtcgatgagagtttttttcagcgcttggatgattcatttcttgttgaagaagataagcaaggaagcaaatatcctatttttggaactttaaaagaggaaaaagagtatcataaaaaatttaaaacgatttatcatttaagggaagaattagcaaattcaaaagagaaagctgatttgcgtttggtgtatttggctttggctcatatgattaaattccgtggtcactttctctatgagggcgacctaaaagctgaaaatacagatgttcaagcattatttaaggattttgtagaagaatatgataagactattgaagaaagccatttatcagaaataacagttgatgcattaagtatcctaacagaaaaggttagtaagtctagccgtttagaaaaccttattgctcattatccaactgagaagaaaaatactttatttgggaatcttattgctttatctttggggctacaggcaaactttaaaacgaatttccaattatctgaagatgctaagttgcaattttctaaagatacgtacgaagaagatttagaagggttacttggggaagttggagatgaatatgcggacctgtttgtatctgctaaaaatctttacgatgccatcttgctgtcagggattttgacagtagatgataactcaacaaaagcacctttgtctgcttcaatggttaaacgctataaagaacacaaagaagaattagctgcttttaaacgttttataaaggaaaaacttcctaaaaaatatgaggaaatttttaaggatgatacaaaaaacggttatgcaggctatgttggtgctgataaaaagttacgaaaaagaagtgggaaattagcaactgaagaagaattttataaatacgtgaaggggattttaaataaagttgaaggtgcagattattttcttgacaaaattgatcgtgaagattttctgagaaaacaaagaacatttgataatggttctattccgcatcaaatccatctgcaagaaatgcatgctatcttgcgacgccaaggtgaacactatccattcttgaaagaaaatcaagataagattgaaaaaatcttaacgtttagaattccttactatgttggtcctttggcgcgaaaaggcagccgttttgcctgggcagaatataaggcggatgaaaaaattacgccatggaattttgatgatattcttgataaagaaaaatcagcagaaaaattcatcacacgcatgactttaaatgatttgtatttacctgaagaaaaagtcttacccaaacacagtcctctatacgaaacctttaccgtttacaacgagttgaccaaagttaagtatgttaatgaacagggtgaagctaaattctttgatacaaatatgaaacaagagatttttgatcatgtttttaaagaaaatcggaaagttacgaaagataaacttttaaattatttgaataaagagtttgaagaatttagaattgttaacttaactggactggataaggaaaataaagcctttaatgcaagtcttggaacttatcacgatttgcgtaagattttagataaatcattcttagatgataaagtaaatgaaaagataattgaggatatcattcaaacactaactctgtttgaagacagagaaatgattcgccagcgtcttcaaaagtatagtgatatttttacaacacagcaattgaaagaattggaacgccgtcattacactggttggggacgcttgtcatacaagttgatcaatggcatccgaaataaagagaataagaaaacaatattagactatctaatcgatgatggttatgctaatcgtaattttatgcagttgattaatgatgatgctctttcttttaaagaagaaattgctagggcacaaatcattggtgatgttgatgatattgcaaatgtagtgcatgacttacctggaagtcctgctatcaagaaagggattttacaaagtgtcaaaatcgttgatgaattagtcaaagtaatggggcataaccctactaatattattatagagatggcgcgtgaaaatcaaacgacagataaggggcgtagaaattctcagcaacgtcttaaattattacaagattcattgaagaatttggacaatcctgtaaatattaagaatgtggaaaatcagcaacttcaaaatgatcgattattcttgtactatatccaaaatggcaaggatatgtatacaggagaaactttagatattaacaatctaagccaatatgatatagatcacattattccgcaagcctttattaaggataattcacttgataaccgtgtgctgactcgttctgacaaaaacagaggtaaatctgatgatgtaccaagtatagaagttgttcatgaaatgaagtcattttggagcaaacttctttcagtaaaactgattacacaacgcaaatttgataatttaaccaaggcagaacgtggcggtctgaccgaaaatgataaagcaggttttattaaacgtcagttagttgagacaagacaaattactaagcatgttgcgcaggttttagatgctcgttttaatgcaaagcatgatgagaataaaaaagtgattcgagatgttaaaatcattactttgaaatctaatctagtttcacaatttcgaaaggactttaagttttacaaagtacgtgaaattaatgattatcaccatgcacatgacgcttatctcaatgcagttattggaacagctttgttgaaaaaatatcccaaacttgcatcagaatttgtatatggtgaattcaaaaaatatgatgtccgtaaatttattgcgaaatctgataaggaaattggaaaagctacagcaaaatatttcttttattcaaatttgatgaacttctttaaaaaagaggttaaatttgcagacggtacagtagttgagaggcctgatattgaaacaagcgaggatggcgaaatagcttggaataaacaaaccgactttaaaattgttcgcaaggttctctcctatccgcaggttaatattgtgaagaagactgaggtacagactcatggtctagatagagggaagccaaggggactttttaatgctaatccttctcctaaacctaaaccagatagtagtgaaaatttagtggggataaagagaaatcttgaccctaagaaatatggtggttatgcaggtatttcaaattcttatgctgtattggttaaagcgattattgaaaaaggagtcaagaaaaaagaaacgatggtactagaatttcagggaatttccattttagaccgaattacttttgaaaaagataaaagagctttcttgttaggaaaaggatacaaagatattaaaaaaatcattgagctacctaaatacagcttgtttgaattgaaagatggatcccgtcgcatgttagctagcattctttcaacaaataataaacgtggagaaattcataaaggaaatgaattgtttgttccacaaaagtttacaactctgctatatcatgccaaacgaattaacaatccaatcaacaaagatcatatagaatatgttaagaagcatagagatgattttaaagagttgctcaactatgtattagaatttaatgaaaaatatgtgggggctactaaaaatggagagcgtttaaaagaagcggtggcggattttgacagcaaaagcaatgaagaaatttgtactagctttttaggagccgttaatagtaagaatgcaggcttatttgagttaacctcattaggaagtgcctcagattttgaatttcttggtgtaaaaattcctagatatagagattacactccctcatcgctattaaaggattctatcctcatccaccaatccatcacgggtctttatgaaacacggattgacttgagtaagttaggagaagattga

SEQ ID NO: 371 - DNA, 3468 bp, Streptococcus dysagalactiae subsp equisimilis
atggataagaaatactcaataggcttagatatcggcacaaatagcgtcggatgggcggtgatcactgatgattataaggttccgtctaaaaagttcaaggttctgggaaatacagaccgccacagtatcaaaaaaaatcttataggggctcttttatttgacagtggagagacagcggaagcgactcgtctcaaacggtcagctcgtagaagatatacgcgccgaaagaatcgtattcgttatttgcaggaaatctttagcagtgagatgtccaaagtagatgatagtttctttcatcgacttgaagagtcttttttggtggaagaagacaagaagcatgaacgtcatcctatttttggaaatatagtagatgaagttgcttatcatgagaaatatccaactatctatcatctgcgaaaaaaattggcagattctactgataaagcggatttgcgcttaatctatttggccttagcgcatatgattaagtttcgtggtcattttttgattgagggagatttaaatcctgataatagtgatatggacaaactatttatccagttggtacaaacctacaatcaattatttgaagaaaaccctattaacgcaagtagagtagatgctaaagcgattctttctgcacgattgagtaaatcaagacgattagaaaatctcattgctcagctccccggtgagaagagaaatggcttgtttgggaatctcattgctttgtcattgggattgacccctaattttaaatcaaattttgatttggcagaagatgctaaattacagctttcaaaagatacttacgatgatgatttagataatttattggcgcaaattggagatcaatatgctgatttgtttttggcagctaagaatttatcagatgctattttactttcagatatcctaagagtaaatagtgaaataactaaggctcccctatcagcttcaatgattaaacgctacgatgaacatcatcaagacttgactcttttaaaagctttagttcgacaacaacttccagaaaagtataaagaaatcttttttgatcaatcaaaaaacggatatgcaggttatattgatgggggagctagccaagaagaattttataaatttatcaaaccaattttagaaaaaatggatggtactgaggaattattggcgaaactaaatcgtgaagatttgctgcgcaagcaacggacctttgacaacggctctattccccatcaaattcacttgggtgagctgcatgctattctgagaagacaagaagacttttatccatttttaaaagacaatcgtgagaagattgaaaaaatcttgacctttcgaattccatattatgttggcccattggcgcgtggaaatagtcgctttgcatggatgactcggaagtctgaagaaacgattactccatggaattttgaagaagttgtcgataaaggtgcttcagctcaatcatttattgaacgcatgacaaactttgataaaaatcttccaaatgaaaaagtactaccaaaacatagtttgctttatgagtattttacggtttataacgaattgacaaaggtcaaatatgttactgagggaatgcgaaaaccagaatttctttcaggaaagcagaaagaagccattgttgatttactcttcaaaacaaatcgaaaagtaaccgttaagcaattaaaagaagattatttcaaaaaaatagaatgttttgatagtgttgaaatttcaggcgttgaagatcggtttaatgcgtcattaggtacctaccatgatttgctaaaaattatcaaagataaagattttttggataatgaagaaaatgaagatattttagaggatattgttttaacattgaccttatttgaagataaggaaatgattgaggaacgacttaaaacatatgctcacctctttgatgataaggtgatgaaacaacttaaacgtcgccattatactggctgggggcgtttgtctcgaaaattgattaatggtattagggataagcaatctggtaaaacaatattagattttttgaaatcagatggttttgccaatcgcaattttatacagctgattcatgatgatagtttaacattcaaggaagctattcaaaaagcacaggtgtctggacaaggccatagtttacatgaacagattgctaacttagctggcagtcctgctattaaaaaaggtattttacagtctgtaaaagttgttgatgaactggtcaaagtaatggggcataagccagaaaatatcgttattgaaatggcacgtgaaaatcagacaactcaaaagggccagaaaaattcgcgagagcgtatgaaacgaatcgaagaaggtatcaaagaattaggaagtcagattcttaaagagcatcctgttgaaaatactcaattgcaaaatgaaaagctctatctctattatctacaaaatagaagagacatgtatgtggaccaagaattagatattaatcgtttaagtgattatgatgtcgatcacattgttccacaaagtttcattaaagacgattcaatagacaataaggtcttaacgcgttctgataaaaatcgtggtaaatctgatgacgttccaagtgaagaagtagtcaaaaagatgaaaaactattggagacaacttctaaacgctaagttaatcactcaacgtaagtttgataatttaacgaaagctgaacgtggaggtttgagtgaacttgataaagctggttttatcaaacgccaattggttgaaactcgccaaatcactaagcatgtggcacaaattttggatagtcgcatgaatactaaatacgatgaaaatgataaacttattcgagaggttaaagtgattaccttaaaatctaaattagtttctgacttccgaaaagatttccaattctataaagtacgtgagattaacaattaccatcatgcccatgatgcgtatctgaatgccgtcgttggaactgctttgattaagaaatatccaaaactagaatcggagtttgtctatggtgattataaagtttatgatgttcgtaaaatgattgctaagtctgagcaggaaataggcaaagcaaccgcaaaacgtttcttttattctaatatcatgaactttttcaaaacagaaattacacttgcaaatggagagattcgcaaacgccctctaatcgaaactaatgaggaaaccggagaaattgtctgggataaagggcgagattttgccacagtgcgcaaagtattgtccatgccacaagtcaatattgtcaagaaaacagaagtacagacaggtgcactgactaatgaatcaatttatgctagaggaagttttgataaattaatcagtcgtaaacatcgttttgagtcctctaaatatggaggatttggcagcccgactgttacttatagtgtgttagtagttgcgaaataccaaagttacaagatggaaaagtaa

SEQ ID NO: 372 - DNA, 4047 bp, Streptococcus equi subsp zooepidemicus
atgaaaaaaccttatactattgctcttgatattggtactaatagtgtaggatgggttgttgtgacggatgattatagggttccaacaaagaaaatgaaggtactaggaaatacagagcgaaaaaccattaagaaaaatttgattggtgccttattatttgatagtggtgatactgcagagggaactcgcttaaaaagaacggcccgtcgcagatatacaagaagaaagaatagactacgttaccttaaagaaatttttactgaggaaatggcaaaagtagatgatggtttctttcaacgactggaggattcattctatgttttagaggataaggagggaaataagcatccgatttttgctaatctagcagatgaagttgcttatcataaaaagtatccaacaatttatcatttacgaaaagagttagtagataatcctcaaaaagcagatttacgcttaatttatttggcagtagcgcatattattaagtttaggggacattttctgattgagggaacattaagttcaaagaataataatcttcagaaatcatttgatcatcttgtggatacctataatctattgtttgaggagcaacgattgcttactgaaggcattaatgccaaagagctgttgtctgcagcattaagtaagtcaaagcgtttagaaaatctcatttctctgattcctggacaaaagaaaacgggtatttttggtaatattattgcactctcgctaggattaacaccaaattttaaagctaattttggtttaagtaaggatgtcaaattacagttggctaaggatacctatgctgatgatttggatagtctactggctcaaattggagatcagtatgctgatttattcttagcggctaaaaatttatcagatgccattcttttgtcagatattttgacagaaagtgacgagataactagagcacctctgtcagcgtctatggtaaaacgttatcgtgagcatcacaaggacttggtcactttgaaaacattaataaaggatcagttaccggagaagtaccaggaaatttttttagataagactaaaaatggttatgctggatatattgagggacaagttagccaggaggaattttacaaataccttaagcctattttagcaagattggatggatcggaaccgttacttctaaaaattgaccgagaagactttttgagaaagcaacgaacctttgataatggctctattcctcaccaaattcatttagaagaattacacgctattttgagaagacaagaagtcttctacccatttttaaaagataatagaaagaaaattgaatctcttttaacgtttagaataccttattatgtgggtccgttggctcgtggtcatagtcgctttgcatgggtaaagcgaaaattcgatggggctattagaccctggaattttgaagagattgttgatgaagaagcttccgcacagatctttattgaaaaaatgactaaaaatgatctctacttgccaaatgaaaaggttcttcctaagcatagcctattatatgaaacttttacagtttataatgagctaacaaaggtcaaatatgctactgaaggaatgacacgtcctcaatttttatctgctgatcagaaacaagctattgttgacttattgtttaaaacaaatcgtaaagtgactgttaaacaattaaaagagaactattttaaaaagattgagtgctgggatagtgttgagattactggggttgaagatagcttcaatgcttcacttgggacctatcatgacttgttaaaaatcattcaggataaggattttttagataatcctgacaaccagaaaatcattgaagatattattttgaccttaacactttttgaagataaaaaaatgatttcaaaacgattagatcaatatgcacatctctttgataaagtcgtattgaataaactggagaggcatcactataccggttgggggcgtttatcaggaaagcttataaatggtattcgagacaaacaatcaggaaaaacaattttagattttctaaaggctgatggttttgccaatcgaaactttatgcagttaattcatgatagtgaactaagctttatagatgagattgctaaagcccaagtgattggaaaaactgagtattcgaaagacctggttgggaatttagcgagtagtccggctattaaaaaaggtatttcacaaacaattaaaatcgttgatgagctggtcaaaatcatgggctatctcccgcagcagattgttattgaaatggcacgtgaaaatcagactacagctcaaggaattaaaaatgctcgtcaacgcatgagaaagctagaagagactgccaaaaaattgggtagcaatattctgaaggagcaccctgttgataatagtcaattgcaaaatgataagcgttacctctattatcttcaaaatggaaaggatatgtatacgggtgatgacttagatattgattatttgagtagctatgacattgatcatatcattccgcagagctttattaagaataattccattgataacaaggtattaacctcacaaggcgctaatcgaggaaaattagataatgttcctagtgaggctattgttaggaaaatgaaaggctattggcaatccttattgagagcaggagctatctcaaagcaaaaattcgataatctgacaaaagcagaacgtggaggtttaactcaagtagacaaagccggctttatccaacgtcaattagtggagacacgccaaatcacaaaacatgtggcacaaatcttagatagtcgcttcaatactgaatttgatgatcataataagcgtattcgaaaggttcatattataacgctaaaatcaaagctggtttctgatttccgtaaagagtttggtttgtataaaattcgtgatatcaatcattatcatcatgctcatgatgcataccttaatgctgttgttgccaaagcgatactaggtaagtatcctcaactagctccagaatttgtttatggagattaccccaaatataatagctttaaggaacgccagaaagcaactcaaaagacgttattctattcaaatatcttaaaattctttaaagatcaagaaagtcttcatgttaactctgatggtgaagaaatatggaatgccaataagcatttacctattattaaaaatgttctttcgattccgcaggttaatatcgtcaagaaaacggaagtacaaacagggggcttctataaagagtccattttgtctaagggtaattctgataagctgatcccaaggaaaaataactgggataccaggaagtatggtggctttgatagtccaactgtagcttattctgttttggtgatagctaaaatggaaaagggaaaagcaaaagtattaaagccagtgaaggaaatggttggtattaccattatggagaggatcgcatttgaagaaaatcctgtagtctttttagaagcaaaaggctatcgagaaattcaagagcatctcattataaaactccctaaatatagcttgtttgaattagaaaatggaagaagacgtttattggcaagtgctagtgaactacaaaaaggaaatgaattgtttcttccagttgattatatgacatttctatatttagctgctcattaccatgagctaactggatcctcagaggatgttttgaggaaaaaatattttgtagagaggcatttgcattattttgatgacattattcaaatgattaatgattttgcagagcgtcatattcttgctagtagtaatttagagaaaataaaccatacatatcacaataattctgaccttccaattaatgaaagagcagagaatataattaatgtgtttactttcgtagccctaggagcacctgcagcctttaaattttttgatgcgactattgatcgaaaacgatatacctcaactaaggaagtgctaaatgccactctcattcatcaatctgttactggtttgtatgagacgcgaattgatttgagtcaattaggagagaactaa

SEQ ID NO: 373 - DNA, 3411 bp, Streptococcus gordonii Challis substr CH1
atgaacggtttagttttaggtttagatattggtattgcctctgtaggggtggggattctagaaaaagatacggggaagatcattcatgctagttctcggctttttccagctgcaactgccgacaataatgtcgaaagaaggagtaatagacagggaagacgattaaatcgcaggaaaaaacaccgtagtgttaggcttcaggatctatttgaaggctatggtttgttaactgatttttctaaagtgtcaatgaatttaaatccttatcaacttcgtgtacaaggaatggagaatcaactcacaaacgaagagttgtttgttgcattgaagaatattgttaaaaggcgtggtattagctatttagatgatgcttctgaggatgggggtacagtatcgtctgattatggtaaggcagttgaagaaaatagaaaattacttgctgaaaagacacctggtcaaatccaactagagcgttttgaaaaatatggtcaattaaggggagattttactgttgaagaaaatggtgaaaaacatcgattgatcaatgtcttttcaacatctgcttatagaaaagaagctgaaagaattcttagaaaacagcaagaatttaatagtaaaattactgatgagtttatagaggattatttaataatccttacagggaaaagaaaatattatcatggaccaggtaatgaaaaatctcggacagattatggacgttttcgaacagatggtactaccttagataatatttttggtattttaattggcaaatgtacattttatactgaggaatatagagcttcaaaagcctcctatactgctcaagagtttaatttactaaatgatttaaataatttaacagttcctacagagaccaagaaacttagtgaggaacaaaagaagctaatcattgaatatgcaaagtcggcgaaaacattaggagcttcaactttattgaagtacattgctaaaatgattgatgcttcagtagatcagatacgtggttaccgagttgatgtaaataataaacctgaaatgcatacttttgaagtctatcggaaaatgcaatctttagaaacgataaaagttgaagaattgcctagaaaagttctagatgagcttgctcatattctaactttgaatacagagcgagaaggtatagaagaagcgattaactcgaagttaaaggatatatttaatcgagatcaagtacttgaattggttcaatttagaaaaaataatagcagtctatttagtaaaggatggcataatttttctattaaactcatgatggagttgataccagaactttatgaaacttcagaagagcaaatgacaattctcacacgattgggaaaacaaagatctaaagagacatcaaaacgaactaagtatattgatgaaaaagaattaacagaagaaatctataatcctgtagtagcaaaatctgttagacaggccataaagataatcaacgaagcaactaaaaaatatggtatctttgataatatcgttatcgaaatggcccgtgaaaataacgaagaagatgctaagaaagattatataaaacgtcaaaaagcaaaccaagatgagaagaatgcggctatggaaaaagcagcgtttcaatacaatggtaaaaaagagttaccagataacatttttcatggccataaggaattgactactaagattcgtttatggcatcaacagggagaaaagtgtctctatactgggaagaatattccaatttcagatttaatccacaatcagtacaagtacgaaatcgatcatattttacctttatctctatcttttgatgatagtttatctaataaagtattagttctagctactgcaaaccaagaaaagggacaacgaacaccgtttcaggctttagatagtatggatgatgcatggtcctaccgtgagtttaaatcatatgtaaaagattcaaaattattaagtaataaaaagaaagattatcttttaacagaagaagacattagtaaaattgaggtgaagcagaagtttattgaacgaaatctagttgatactagatattcttctcgagttgttttaaatgccttgcaagatttttataagagccatcaattggatacaactatttcggtggtacgtggacaatttacctctcagctaaggagaaagtgggggattgaaaaatctcgtgagacctaccaccatcatgctgtggatgcattaattattgctgcttccagtcaattaagattatggaaaaaacatagtaatcctctgattgcttataaagaagggcaattcgttgattcagagactggagaaatcgtttcattaagtgatgaagaatacaaagagttagtatttaaagcaccttatgatcattttgttgacacattacgtagtaagaagtttgaggatagcattttgttttcatatcaagtggattcaaaatataaccgtaaaatttcagatgcgaccatttatgcaacaagaaaagcaaaattggataaagagaaaaaagaatatacttatactttggggaaaataaaagatatctatgctttagggacaaaaactccgtctaaaacaggattttataagtttttagatttatacaagacggataaatctcaattcttaatgtatcagaaggataggaaaacttgggatgaagtaatagagaagataattgaacaatatcgaccatttaaagaatatgacaaaaatggaaaagaggttgatttcaatccttttgaaaaatatagaattggaaatggtcctattcggaaatatagtaaaaaagggaatggtccagaaattaaaagtctgaaatactacgatatattattaggtaaacacaaaaatataactcctgatgggagtcgaaatactgtagctttgttatctttaaatccttggagaacagatgtttactacaattcggaaactaaaaaatatgaatttttgggattaaagtatgcagatttgtgtttcgaagaggggggagcctatggtatttctgaagttaagtataaaaagataagagagaaagaaggaattggtaagaattctgaatttaagtttaccctgtataagaatgatttaattttaattaaagatactgaaacgaattgtcaacaattctttagattttggtctcgtactgggaaagataatccaaaaagttttgaaaaacataaaatagaattgaaaccttatgaaaaagcaaaatttgagaaaggagaagaacttaaagtattaggaaaggtaccaccttcctctaatcaattccaaaaaaatatgcaaatagaaaatctttctatttacaaagtcaaaacagatattttaggaaataaacatttcatcaaaaaagagggtgatgaaccaaaactcaaatttaaaaaataa

SEQ ID NO: 374 - DNA, 3390 bp, Streptococcus infantarius subsp infantarius
atgagtaatggaaaaattttaggcttggatattggtgtagcttccgttggtgttggtattattgattcaaaaacaggaaatgtaatacatgccaattcgcgtttattttctgctgcaaatgctgaaaataatgctgaaaggagaggttttcgcggtgcaagacgtttaacccgtcgtaaaaaacatcgtgtaaaacgtgttcgtgatttatttgaaaaatatgatatttcaactgattttagaaatctaaatttaaatccgtacgaacttcgtgttaaagggttaacggaacaattaacaaatgaagaattgtttgctgctttgcgtacaattgcaaaaagacgcggcatttcatatcttgatgatgcagaagatgattcaacaggtagttcagattatgcaaaatctattgatgagaatcgtcgtttgttgaaaactaaaactccaggtcaaattcaattagaacgattggaaaaatatggtcaattacgtggaaacttcacagtgtatgatgaaaatggtgaagctcatagactaattaacgttttctctacttctgattataagaatgaagcacgtaaaattttagaaactcaatcaaactataataaacaaattacagatgagtttattgaagactatattgaaatcctaactcaaaaaagaaaatattaccatgggccaggtaacgaaaaatctcgtacagattacggacgttttcgtacagatggaacaaccttggagaatatctttggaattttgattggaaaatgtagtttttatcctgaagaataccgtgcttctaaagcttcatatactgcgcaagagtttaactttttaaatgatttaaataatttaaaagttcctactgaaactggtaaattgtctactgagcagaaagagtatttagtagattttgctaagaaatcaaaagcactcggtgcttctaaattattaaaagaaattgcgaagatagtagattgtagtgtagatgatattaagggctatcgagtagataataaagataagccagatttgcatacttttgagccttatcgtaagttaaaatttaatttaagttcaattgatattgatgaactatcaagagaaacattagataaactggcagatattttaacgcttaatacagaacgtgagggtattgaagatgctatcaaacgcaatcttccaagtcaatttaccgaagaacaaatttctgaaattgtccaaattaggaaaaatcaaagttcagcattcaataaaggttggcatagcttttcagctaaattgatgaatgaattaatccctgaactgtatgtaacatctgaagaacagatgacaattttgacaagactagaaaaattcaaggttaataaaaaatcatcaaaaaatacaaaaacaattgatgaaaaagaaataacagatgaaatttataatcctgttgtagcaaaatcagttcgacaaacaattaaaatcattaatgcggctgttaagaaatatggcgattttgataagattgttatcgagatgccacgagataagaatgctgaagatgagaagaaatttattgataaaaagcaaaaagaaaataaaaaagaaaaagatgattctttaaaacgagcagcttttctttataatggtactgataacttacctgatggcgtttttcatggcaataaagagttaaaaactaaaattcgcctttggtatcaacaaggtgagcgttgtttatattctggtaagctaatttctattcatgatttagtgcataattcaaataagtttgagattgatcatattttgcctctatcactttcttttgatgatagtttagctaataaggttttagtgtatgcttggactaaccaagagaagggacaaaaaactccttatcaagttattgattctatggatacggcatggtcatttagagaaatgaaagattatgtcttaaaacaaaaagggcttggtaagaaaaaatgtgaatatcttttaacaacagaaaatatcgataaaatcgaagttaaaaagaaatttatcgaacgtaatcttgtggacactcgttatgcttcacgagtagtgcttaatagtcttcaaacagcattaaaagagttggggaaagatactaaagtttctgttgtcagaggtcagtttacatcacagctccgccgaaaatggaatattgataaatcgcgcgaaacataccaccatcatgctgttgatgctttaattattgctgcttcaagtcaattgaaattgtggcaaaaacaagaaaatccgatgtttgagagctatggtgaaaatcaagtggtgaataaagagactggtgaaattttaagtatctctgatgataaatataaagaattagttttccaaccaccttatcaaggatttgtaaatacgatttcaagtaaaggatttgaggatgaaattttattctcttatcaagttgattcaaaatttaatcgtaaagtctctgatgctactatttactcaacacgaaaagctaaacttggaaaagataaaaaagatgaaacttatgttttagggaagataaaagatatctacagtcaagatggttttgatacttttattaaaagatataaaaaagataaaacacaattcttgatgtatcaaaaagatcctctaacttgggaaaatgttattgaagttattctcagagattatccaagtgaaaaactttccgaagatggtaaaaaaactgtaaaatgcaatcctttcgaagagtatcgtagagaaaatggcttaatctgtaaatacagtaaaaaaggaaatggaacaccaattaagtctcttaagtattatgataaaaaattaggaaattgtattgatataacacctgaaaaatctaaaaatagagttgtattgagacaaatttctccatggcgagctgatatttactttaatctagagactttaaaatatgaactgatgggattgaaatattctgatttaagttttgaaaaaggaactggtaagtatcatatctcacaagaaaagtatgatgcgataagggaaaaagaaggtatcggcaaaaaatcagaatttaagtttactctttaccgaaatgatttgattttaatcaaagatactctaaataattgtgaaaggatgttaagattcggctcaaaaaatgatacatctaagcactatgtggaattaaaaccattagaaaaaggaacttttgattctgaggaagaaattttaccagttttgggaaaagttgcaaaaagtggacagtttattaaaggtttaaataaacctaacatatcaatctataaagttcgaacagatgttcttggtaataaattctttattaaaaaagaaggtgataaacctaagttagattttaaaaataataacaaataa

SEQ ID NO: 375 - DNA, 3378 bp, Streptococcus intermedius B196
atgaacggtttggttttaggattggatatcggtattgcttctgtcggagtgggaattttaaataaagaaacaggtgaaattattcacgttaattcgagaatttttccagctgcaaccgcagacagcaatgtagaacgtcggggatttagacaaggaagaagacttggtcgaaggaagaaacatcgcagcgctcgcttaaacgacctttttgaagaattcggttttataacagatttttctgctgtccctttaaatttaaatccttatgctctgcgtgtgaagggattaagcgaagaattaacaaatgaagagttgtttattgcgcttaaaaacattattaaacggcgtggtatcagctatctggatgatgctagtgaagatggagaaacagcttccaatgagtatggaaaagcagttgaagaaaacagaaaattacttgcagacaaaacgcctggacaaatccagttggaacgttttgaaaaatacggacaagttcgtggggattttacagttgttgaaaatggggagaatcatcgtttgattaatgtattttctacttcagcctacaaaaaagaagcagagcgaattcttagaaggcaacaagaattcaatgtgaggatttcagatgaattcattgaagcttatttaactattttgactggcaaaagaaaatattatcatgggcctggaaatgaaaaatctagaacagattatggaagatttcggacagatggcacaactcttgataatattttcggtattttaattggaaaatgtactttttatcccgatgaatatcgagcagcaaaggcgtcatataccgcgcaggaatttaatttgctcaacgacctcaataatttaacagttccaactgaaacgaaaaaattaagaccagaacaaaagcggcagattgtcgagtatgctcgaactgcaaaaactttaggaactccaactttactgaaatatattgctaagttagtagatggttctattgatgacataaaaggatatcggattgataaatctgataaaccggagatgcatacttttgacgcctatcgtaaaatgagaacactagaactggtggatgtagatatattatcaagagaaaccttagatgatttagcgtacattctaaccttgaacacagaaagtgaaggtattttagaagctcttaacagtaaaatgcctggtacatttaccaaagagcagattgatgagttaattcagtttaggaagaaaaacagtgcggtatttggaaaaggttggcataatttttctcttaagttaatgaatgaattgattccggagctttatgagacttcagaggagcaaatgactattttgactcgtctaggtaaacaaagaagtagagaaatttcaaaacgaactaaatacatagatgaaaaagaattaacagatgaaatttataaccctgttgttgccaaatctgtccgtcaggctattaaaatcatcaacttagcgaccaaaaaatatggcatttttgataatattgtcattgaaatggcgcgtgaaagcaatgaagatgatgagaaaaaagcaattcaaaacgtccaaaaagccaatgaagatgaaaagaaagcagcaatggaaaaagctgctgatctatacaatggtaaaaaagagttaccagacagtatttttcatggacacaaagagttagcaaccaaaattcgcctttggcatcaacagggagaacgctgcctttatacaggaaagaacatctctattcatgatttaattcataatccacaccagtatgaaattgatcatattctgccgctttcactttcttttgatgatggcttagccaataaggttctggtgctagcaacagctaatcaggaaaagggacagagaacaccattccaggctttagatagtatggatgatgcgtggtcttacatagagttcaaacaatatgtccggaattctaaaagcttaagtaataagaaaaaagactatctgctgaccgaagaagatatcagcaagattgaagtaaaacaaaaattcattgagcgcaatctcgtggacacacgttactcatcacgggtagtcctaaatacgttgcaggaattttacaaaacaaatgatttcgatacaaaaatttcggttgttcgtggtcaatttacatcacaactgagaagaaagtggaaaattgaaaaaagtcgtgatacctatcaccaccacgcagtagatgctctcatcatcgcggcctccagtcagttgagactctggaaaaagcagaataatcctttgatttcttatagagaagggcagcttgtagatcctgaaacgggagagattctttcactgacagatgacgaatataaggaacttgttctcagaccaccatatgattattttgtagatacattgaagagcaaatcgtttgaagacagtatcttgttttcttatcaagtggattctaaatataaccgaaaaatatcagatgctacaatctatggaactagaaaagctcagttggggaaagataagcaggaggaaacttatgtacttggaaaaattaaggatatctattctcaaaagggctatgaagattttatcaagagatataagaaagatacaactcagttcttgatgtatcacaaagatccacagacctttgcaaaagttattgaagaaattcttaaaacctatcctgacaaagagttaaacgaaaagggtaaagaaattccctgcaatccttttgaaaagtacagacaagaaaatggccctattcgaaaatacagcaaaaagggcaaaggcccagagattaaaagccttaagtattatgataataaacttggcaatcacattgatattactcctgtaaacagtcagaaccaggttgttttgcagtccttgaagccttggcggacagatgtttattttaatccccagacttccaaatatgaattgatgggattgaaatattcagatttaagatttgaaaaagggagtggaagctacggtatttcacctgaaaaatataataaagtcaaagcaaaagaaggagtggacgaggattcagaatttaaatttactttatataagaacgatttgattttgataaaagacaccgaaactggagagcagcaattatttaggtatggttcgcgaaacgatacctcaaaacattatgttgagttaaaaccttatgaaaaagcgaaatttgaaggaaatcaacagctgatgaatttgttaggaaccgttgcaaaaggtggtcaatgcctcaaagggataaacaagcctaatctctccatctataaagtcaaaacagatgttcttggtaataaatattttattaaaaaagagggtgatcagccacagctcaattttaagaaaaaaatttaa

SEQ ID NO: 376 - DNA, 4122 bp, Streptococcus lutetiensis 033
atggaaaaaacatattcaatcggactcgatatcggaacaaacagtgtgggttggagcgtaattaccgatgattacaaagttccagctaaaaagatgaaagtcttaggaaatactgataaaaagtatattaagaagaacttattaggtgcactgttatttgatagtggtgaaactgctgaagtaactcgtttaaaacgtacagctagacgtcgctacacacgccgtaaaaatcgtttacgttatttgcaagaaatttttgctaaagaaatggcaaaagttgatgaaagtttctttcaacgtttagaagaatcatttctgacagatgatgataaaacctttgattcccatccaatttttggaaataaagccgaagaagatgcttatcatcaagagtttcctacaatttaccatttgagaaaacatcttgcagattcatctgaaaaagcagatttacgcttggtttatctagctttagctcatatgattaaattccgtggacatttcttaattgagggtgaattgaacgctgaaaatacagatattcaaaagttattcaatgattttgttgaaacatatgataagattgctgatgaaagtcatttgtcggaagttgatgcttcaagtatcctaactaacaaaattagtaaatcacgtcgtttggaaaatcttattaaacaatatccaacagaaaagaaaaatactttatttggaaatcttgtagcattagttttaggattgcaacctaacttcaaaacaaactttaaattatccgaagatgcaaaattacaattttctaaagatacttatgatgaagatttggaagaattgttggggaaaattggtgatgactatgctgatctttttacagcagctaaaaatctatatgatgcaattttactttcaggtatcttaacagtagatgataattcaactaaagcaccattatctgcttcgatgattaaacgctatgaagagcaccatgaagatttagaaaagttaaaaaaatttattaaagtgaataattttgataagtatcatgagatttttaaagataaaagtaaaaatggttatgctggatatattgaaaatggtgttaagcaagatattttttataaacatcttaagagcattatttctgagaaaaacggaggtcaatatttccttgataaaattgaacgtgaagattttttgagaaaacaaagaacgtttgataatggctctattccacatcaaattcatttacaagaaatgcgtgctattttacgacgtcaaggtgagtattatccattcttaaaagaaaatcaagctaaaattgaaaaaatattaacttttagaatcccttactacgtaggtccattagcaagaaaagatagtcgttttgcttgggctaattaccattcagatgagccgattacaccgtggaattttgatgaagtggtggataaagaaaaatcagctgaaaagtttatcacacgaatgactttaaatgatttatatttacctgaagaaaaggttttaccgaaacacagtcatgtatatgaaacatttacggtttataatgaattaacaaaaattaagtatgttaatgaacaaggtgagtcgtttttcttcgatgcaaatatgaagcaagaaatctttgaccacgtatttaaagaaaatcggaaagttacgaaagctaaacttttaagctatcttaataatgagttcgaagagtttcgaatcaatgatttaattggtcttgataaagatagtaaatcatttaatgcaagccttggaacttatcatgatttgaaaaagattttggataaatctttcttagatgataagacaaatgaacaaatcattgaagatattgtgttgactttgaccttatttgaagatagagatatgattcatgaacgtcttcaaaaatacagtgatttctttacttcgcaacagttgaagaaacttgaacgtcgccattatactggttggggacgtctatcatataaactgattaatggaattcgcaataaggaaaataacaaaactattcttgatttcttgattgatgatggtcatgctaaccgcaattttatgcaattgattaacgacgagtcattatcatttaaaactattattcaagaagcacaagttgtaggtgatgtcgatgatattgaagctgttgttcatgatttacctggaagtcctgctattaaaaaaggtattctacaaagtgtcaaaatcgttgatgagctagttaaagtgatgggagataaccctgataatattgttattgaaatggcgcgtgaaaatcaaacaactaatagagaaagaagccagtcccaacaacgtttgaaaaaacttcagaactcattaaaagagttaggaagtaatattcttaatgaggaaaaaccgtcatatattgaagataaggttgaaaatagtcatcttcaaaacgatcaactcttcctttactacattcaaaatggtaaagatatgtacactggtgatgagttagatattgaccatctaagcgattatgatattgaccacattattcctcaagcctttattaaggataactctattgataatcgagtactaacaagttctgctaaaaatcgaggtaaatcagatgatgtaccaagtcttgatattgttcgtgctagaaaggcagaatgggttcgattgtataaatcaggactaatctctaaacgtaaatttgataatttaacgaaagccgaacgtggtggattaactgaagctgataaagccggatttattaaacgccaattagttgaaacacgtcaaatcacaaaacatgtcgcacaaattttagatgcccgttttaatacaaaacgtgatgaaaatgacaaggtgattcgtgatgtaaaagtcattactttgaaatcaaacttagtttcgcaattccgaaaagaatttaaattctataaagttcgtgaaattaatgattatcaccacgctcacgatgcttatctcaacgcagtagttggaacagctttgcttaaaaaatatccaaaattaacaccagaatttgtatacggtgagtataaaaaatatgatgttcgtaaacttattgccaaatcttctgatgactattctgaaatgggtaaagcaacagcaaaatatttcttctattcaaatttgatgaacttctttaaaactgaggtcaaatatgcagatggtagagtatttgaacgaccagatattgagacaaatgcagatggtgaagttgtctggaataagcaaaaagattttgacattgttcgaaaagttctgtcataccctcaagttaatattgttaagaaggtagaagagcagacagtcggacaaaatggtggtttatttgataataatatcctagccaaacctgaaaaagatgataagaaaaaattatttccaattaaaaaatcactttctacaacttcatatgggggatatgctagagctacaatagcttattctattttgattgttagtgaatttggtaaaaataaagaattgaaattactaggtctaccacttcttgataaagtaaaatatgagaaaaatcctattgcatatttaaatagtattggaataataaatgtaaaaagtatctttaaacttcctaagtactgtttatttgaatttcaagaaaagaacactaattatcgtagatatatggtaagtaatcaggaattaaaaagggctaatcaattgtttttaacatgtaaagagactgagttagtatacaagtatataaaaagtgataacgacaatacacatttagttggtaatgaaaagacaatattatctatctggaataaattggttatttttatggaaagaactaaattaattgataagaaattgtttgcgtcgttgaaacaattaaaagacgaagttgacttaataaatattttagatatgactgctaaatcattggattttactaaaattagtgcaggacagaagaaaatcacaataagtgattctttatcgttaccaatcaagcgatggcaattttctagtgatgaaaaaatgttaaaacaattaaagactgccacccttatccaccaatctgtcactggcctttatgaaacacgtattgatttgagtaaattaggagaagagtaa

SEQ ID NO: 377 - DNA, 4179 bp, Streptococcus mitis SK321
atgaacaataacaattactctatcggactcgatatcggaacaaacagcgtcggatgggccgtcattacggatgactataaggtgccatcgaaaaagatgaaagttctaggcaatacagataaacactttatcaagaaaaatctaattggagctttattatttgatgaaggagctactgctgaagatagacgtttcaaacgaacagcacgccgtcgctatactcgtcgaaaaaatcgtcttcgctatcttcaagaaatcttttctgaggaaatgagcaaagtggatagtagtttctttcatcgattagatgactcattcttagttcctgaggataaaagaggaagtaaatatcctatttttgctaccttggcagaagaaaaagaatatcacaagaaatttccaactatctatcatttgagaaaacaccttgcggactcaaaagaaaaaactgacttgcgcttgatctatctagcattagcgcatatgattaaataccgcggacattttttgtatgaagaatctttcgatattaaaaacaatgatatccaaaaaatctttagcgagtttataagcatttacgacaacacctttgaaggaagttcacttagtggacaaaatgcacaagtagaagcaatttttactgataaaattagtaaatctgctaagagagaacgcattctaaaactctttgcttatgaaaaatccactgatctattttcagaatttctcaagctgattgtaggaaatcaagctgattttaagaaacactttgacttggaagaaaaagctccactacaattctctaaagatacctatgatgaggatttggaaaacttactcggacaaattggagatgactttgcagaccttttcctagttgctaaaaaactctatgatgccattcttttatcaggaatcttaactgttacagattcttcaactaaggccccactatcagcatctatgattgagcgctatgaaaaccaccaaaaagacttagcggctttaaaacaattcatccaaaacaatcttcaagaaaaatatgatgaagttttctctgaccaatctaaagatgggtatgctaggtatatcaatggcaaaaccactcaagaagcattttacaagtacatcaaaaatcttctctctaaattcgaaggatcagattatttccttgataaaattgaacgtgaagatttcttgagaaaacaacgcacctttgataatggttctatccctcatcaaattcatcttcaagaaatgaatgccattatccgtcggcaaggagaacattatccatttctgaaggaatataaagaaaagatagagacaatcttgactttccgtattccttattatgttggcccattggctcgtggaaatcgtaattttgcttggcttactcgaaactctgaccaagcaatccgaccttggaattttgaagaaattgttgatcaagcaagctctgcggaagaattcatcaataagatgactaactatgacttgtatctgccagaggaaaaagttttgcccaagcatagtctcttgtatgaaacatttgctgtctacaatgaattaacaaaagtaaaatttatttcagagggattgagagactatcaattccttgatagtgggcaaaagaagcaaattgtcaatcaattattcaaagagaaaagaaaagtaactgaaaaagacatcattcagtatctacacaatgttgatggctacgatggaatcgaactaaaaggaattgaaaaacaatttaacgctagtctttctacttatcatgatttactcaaaataatcaaggataaagagtttatggatgatcctaaaaatgaagagattcttgaaaatatcgtccacacactaactatctttgaagatcgtgagatgatcaagcaacgccttgctcaatatgcctctatctttgataaaaaagtgatcaaggcactgactcgtcgacattatactggttggggaaaactctctgctaagctaatcaacggtatctgtgataaaaaaactggtaaaacaattcttgactacttgattgatgacggctacagcaatcgtaactttatgcagttaatcaatgatgacgggctttccttcaaagatattattcaaaaagcacaagtggttggtaagacaaacgatgtgaagcaagttgtccaagaactcccaggtagtcctgctattaaaaagggaattttacaaagtatcaagcttgtcgatgagcttgtcaaagttatgggccatgctcccgagtccattgtgattgaaattgcacgagaaaatcagacaactgccagagggaaaaagaattctcaacaaagatataagcgcattgaagatgcactaaaaaatttagcacctgggcttgattcaaatatattaaaagaacatccaacagataatattcaacttcaaaatgaccgtctcttcctttactatctccaaaatgggaaggatatgtacactggagaagctcttgatatcaaccaactgagcagctatgacattgaccacatcgtcccacaggcctttatcaaggatgattctcttgataaccgtgtcttgactagttcaaaggataatcgtgggaaatccgataatgttccaagtttagaagtcgttcaaaaaagaaaagctttttggcaacaattactagattccaaattgatttcagaacataaatttaataatttaaccaaggctgaacgtggtgggctagatgagcgagataaagttggctttatcagacgccaactagttgaaacacggcaaatcacaaaacatgttgctcagattttggatgcccgttttaatacagaagtgaatgagaaagataagaagaaccgtaccgtcaaaattatcactttgaaatccaatctagtttccaacttccgtaaagaatttaagttatataaggtacgcgaaatcaatgactaccaccatgcacatgatgcctatttaaatgcagtggtggctaaggctatccttaagaaatatcctaaactagagcctggattcgtctatggtgactatcaaaagtacgatattaagagatatatttccagatccaaagatcctaaagaagttgaaaaagcaactgaaaagtatttcttctactcaaacttgttgaacttctttaaagaagaggtgcattacgcagacggaaccatcgtaaaacgagagaatatcgaatactctaaggacactggggaaatcgcttggaataaagaaaaagatttcgctacaattaaaaaagttctttcacttccgcaggtgaatattgtgaagaaaacagagattcaaacacatggtctagatagaggtaaacctagaggattgttcaattccaatccatctcctaaaccttcagaagatcgtaaagaaaaccttgtcccaattaaacaagggcttgacccacgaaaatacggtggttacgctggtatttctaactcatacgcggtcttagttaaagctattattgaaaaaggagcgaaaaaacaacaaaagaccgttcttgaatttcaaggtatctctattttagataaaataaattttgaaaagaacaaagaaaactatcttcttgaaaaaggatacataaaaattctatcaactattactttacctaaatatagtttgtttgagtttcctgatggtacaagaagaagactagcaagtattctatcgacaaacaataaacgaggagaaattcataaaggtaatgaattggtcatccctgaaaagtatacgactcttttgtatcatgctaagaatattaataaaacacttgaaccagaacacttagagtatgttgagaaacatcgaaatgattttgctaaacttttagaatatgtacttaactttaacgataagtatgtaggcgcattaaaaaatggagaaagaatcagacaagcatttattgattgggaaacagttgatattgaaaagttatgtttcagtttcattggtccaagaaatagtaaaaatgctggtttattcgagttaacttcacaaggaagtgcttctgacttcgagttcttgggagtaaaaattccacgatacagagactatacaccttcgtcactcctcaacgccaccctcatccaccaatccatcactggtctttacgagactcggattgacttaagcaaactgggagaagactga

SEQ ID NO: 378 - DNA, 4038 bp, Streptococcus mutans UA 159
atgaaaaaaccttactctattggacttgatattggaaccaattctgttggttgggctgttgtgacagatgactacaaagttcctgctaagaagatgaaggttctgggaaatacagataaaagtcatatcgagaaaaatttgcttggcgctttattatttgatagcgggaatactgcagaagacagacggttaaagagaactgctcgccgtcgttacacacgtcgcagaaatcgtattttatatttgcaagagattttttcagaagaaatgggcaaggtagatgatagtttctttcatcgtttagaggattcttttcttgttactgaggataaacgaggagagcgccatcccatttttgggaatcttgaagaagaagttaagtatcatgaaaattttccaaccatttatcatttgcggcaatatcttgcggataatccagaaaaagttgatttgcgtttagtttatttggctttggcacatataattaagtttagaggtcattttttaattgaaggaaagtttgatacacgcaataatgatgtacaaagactgtttcaagaatttttagcagtctatgataatacttttgagaatagttcgcttcaggagcaaaatgttcaagttgaagaaattctgactgataaaatcagtaaatctgctaagaaagatagagttttgaaactttttcctaatgaaaagtctaatggccgctttgcagaatttctaaaactaattgttggtaatcaagctgattttaaaaagcattttgaattagaagagaaagcaccattgcaattttctaaagatacttatgaagaagagttagaagtactattagctcaaattggagataattacgcagagctctttttatcagcaaagaaactgtatgatagtatccttttatcagggattttaacagttactgatgttggtaccaaagcgcctttatctgcttcgatgattcagcgatataatgaacatcagatggatttagctcagcttaaacaattcattcgtcagaaattatcagataaatataacgaagttttttctgatgtttcaaaagacggctatgcgggttatattgatgggaaaacaaatcaagaagctttttataaataccttaaaggtctattaaataagattgagggaagtggctatttccttgataaaattgagcgtgaagattttctaagaaagcaacgtacctttgacaatggctctattccacatcagattcatcttcaagaaatgcgtgctatcattcgtagacaggctgaattttatccgtttttagcagacaatcaagataggattgagaaattattgactttccgtattccctactatgttggtccattagcgcgcggaaaaagtgattttgcttggttaagtcggaaatcggctgataaaattacaccatggaattttgatgaaatcgttgataaagaatcctctgcagaagcttttatcaatcgtatgacaaattatgatttgtacttgccaaatcaaaaagttcttcctaaacatagtttattatacgaaaaatttactgtttacaatgaattaacaaaggttaaatataaaacagagcaaggaaaaacagcattttttgatgccaatatgaagcaagaaatctttgatggcgtatttaaggtttatcgaaaagtaactaaagataaattaatggatttccttgaaaaagaatttgatgaatttcgtattgttgatttaacaggtctggataaagaaaataaagtatttaacgcttcttatggaacttatcatgatttgtgtaaaattttagataaagattttctcgataattcaaagaatgaaaagattttagaagatattgtgttgaccttaacgttatttgaagatagagaaatgattagaaaacgtctagaaaattacagtgatttattgaccaaagaacaagtgaaaaagctggaaagacgtcattatactggttggggaagattatcagctgagttaattcatggtattcgcaataaagaaagcagaaaaacaattcttgattatctcattgatgatggcaatagcaatcggaactttatgcaactgattaacgatgatgctctttctttcaaagaagagattgctaaggcacaagttattggagaaacagacaatctaaatcaagttgttagtgatattgctggcagccctgctattaaaaaaggaattttacaaagcttgaagattgttgatgagcttgtcaaaattatgggacatcaacctgaaaatatcgtcgtggagatggcgcgtgaaaaccagtttaccaatcagggacgacgaaattcacagcaacgtttgaaaggtttgacagattctattaaagaatttggaagtcaaattcttaaagaacatccggttgagaattcacagttacaaaatgatagattgtttctatattatttacaaaacggcagagatatgtatactggagaagaattggatattgattatctaagccagtatgatatagaccatattatcccgcaagcttttataaaggataattctattgataatagagtattgactagctcaaaggaaaatcgtggaaaatcggatgatgtaccaagtaaagatgttgttcgtaaaatgaaatcctattggagtaagctactttcggcaaagcttattacacaacgtaaatttgataatttgacaaaagctgaacgaggtggattgaccgacgatgataaagctggattcatcaagcgtcaattagtagaaacacgacaaattaccaaacatgtagcacgtattctggacgaacgatttaatacagaaacagatgaaaacaacaagaaaattcgtcaagtaaaaattgtgaccttgaaatcaaatcttgtttccaatttccgtaaagagtttgaactctacaaagtgcgtgaaattaatgactatcatcatgcacatgatgcctatctcaatgctgtaattggaaaggctttactaggtgtttacccacaattggaacctgaatttgtttatggtgattatcctcattttcatggacataaagaaaataaagcaactgctaagaaatttttctattcaaatattatgaacttctttaaaaaagatgatgtccgtactgataaaaatggtgaaattatctggaaaaaagatgagcatatttctaatattaaaaaagtgctttcttatccacaagttaatattgttaagaaagtagaggagcaaacgggaggattttctaaagaatctatcttgccgaaaggtaattctgacaagcttattcctcgaaaaacgaagaaattttattgggataccaagaaatatggaggatttgatagcccgattgttgcttattctattttagttattgctgatattgaaaaaggtaaatctaaaaaattgaaaacagtcaaagccttagttggtgtcactattatggaaaagatgacttttgaaagggatccagttgcttttcttgagcgaaaaggctatcgaaatgttcaagaagaaaatattataaagttaccaaaatatagtttatttaaactagaaaacggacgaaaaaggctattggcaagtgctagggaacttcaaaagggaaatgaaatcgttttgccaaatcatttaggaaccttgctttatcacgctaaaaatattcataaagttgatgaaccaaagcatttggactatgttgataaacataaagatgaatttaaggagttgctagatgttgtgtcaaacttttctaaaaaatatactttagcagaaggaaatttagaaaaaatcaaagaattatatgcacaaaataatggtgaagatcttaaagaattagcaagttcatttatcaacttattaacatttactgctataggagcaccggctacttttaaattctttgataaaaatattgatcgaaaacgatatacttcaactactgaaattctcaacgctaccctcatccaccaatccatcaccggtctttatgaaacgcggattgatctcaataagttaggaggagactaa

SEQ ID NO: 379 - DNA, 3390 bp, Streptococcus orisratti DSM 15617
atgacaaatggaaaaattttaggtttggatatcgggattgcatctgtaggagttggtgttattgaagctgatacaggaaaagttgtccatgcaagttctcgattatttccatcagctaatgcggataacaatgcagagcgtcgaggttttcgtggtggaaggcgcttgattcgtcgtaagaagcaccgtatgaaacgtgtgaaagatttatttgaagaatataaactagagacacgatttaacaatctaaatttaaacccatatgagctaagggttagaggactgacagagaagctggcacctgaggaactgtttgctgcattgaaaaatctcagtaagcatcgggggatatcttatcttgatgatgcagaagatgataatgcaagtgctaaaactaactatgctaaatctgttttagctaataaagagcttctaaaaacaagaacaccaggacaaattcaatgggaacgctttgaaaaatatggtcagatacgtggagattttgacattgtgacacctgagggagagcaacagcggattatcaatgtcttttcaacgacagattataaaaaagaagcagagcaaatcttggagacacaagcactctattatcctcaaattagttcagaatttattgaggattttattactattttaacctcaaaaagaaaatattatcatggcccaggaaatgaaaaatctcggacggactatggacgctatcgcacggatggtacaacgcttgataatatttttgatattttagttggaaaatgtggtatctatccagatgagtaccgtgcagcaaaggcttcctatactgcacaagaattcaattttttaaatgatttgaataatttgacacttcctacagagaccaagcgtttaagcactgatcagaaaaaagacctagtcagatttgcaactactgctgcaactttaggacctgacaaattactaaaagaaattgctaggatggttggatgctccaaagatgatatcaaaggctatcgtattgacaataaagaaaaaccagatttgcatacttttgaagcttatcgagcgatgaccaaattaaatacctttgatgtagctaccttctctagagaaatgatagatgagctagcacgtattttaactctaaatacagacagagaaggaattgaagaggctatcgtaaacgattttcccaatctattttctagggaacaaattgatgaattgattcagtttagaaaatcaaaaagccagctatttggaaaaggttggcatagcttctcactgaaattaatgtcagaacttattcctgagttatatgctactagtgaagaacagatgaccattttgacgagattaaataaaatgtctcccgagcgaaaagtcactcttcgaaccaagtacatcaatgagcaggatgctacagaggagatttataatcctgttgttgctaaatctgttcgacaagctattaaaatcatcaatgaatgtatcaaaaagtggggagaatttgatcagatcgttattgaaatgccacgtgataaaaatgaagatgatgagaagaagcgaattgcggatgggcaaaaagctaatgctaaggaaaaggcgagtgccacagagtttgcagcatctctttacaatgggaaaaaagaactgccagatgaggtctttcatgggcacaagcagttagctactaagattcgtttatggtatcagcaagacggaaaatgtttatacactggtcaagatatctctattcatgatttaattcataatcaaaatcaatatgaaattgatcatattatgcctttatccttatcgtttgatgatagtctgagcaataaggttttagttttagcaaccgcaaaccaagaaaaagggcagcaaacgccttatcaggctattccaaagatgaagtcagcctggtcttatagggaatttaaagcctttgttttggattgtaagaggttaagtaagaagaaacgtgagtatttattaacagaagaagatattgataaaattgaggtcagacgaaaatttattgcacgtaacttggttgatacacgctatgcttcgcgggtagtgctaactaccttacaagatgctttagaagtaatgaataaagagaccaaagtttcagtagttcgtggtcaatttacctcacaattgcgcagacagtggaaaattgataaaacacgagatacctatcatcatcatgctattgatgctcttattattgcggcttctagtcagttaaaattgtggaaaaaacaagataatccgatgtttgaagagtatgagcaaggtcaaaagatcaatttggaaacaggtgagattttatcagatgacgactacaagaaattagtcttccaatcaccttatcaaggctttgttcacacgatttcttcaaaatcatttgaggatgagattctcttttcttatcagatagattctaaggtcaaccgaaaaatctcggatgcaacgatttatgcgacaagacaagcgcaattatcaagagataggaaaaaagaaacctatgttttaggtaaaattaaagatatctatagccagacgggttatgatgccttccgtaaacgatatgataaagataagacagtatttttaatgtatcagaaggatcctttgacttgggaaaaggttattgaagtgattctacgtgattacaaagagtttgacgataaggggaaagaagtcggcaatccttttgaaagatatcggcaacaaaatggcttaatgactaagtatagtcgtaaaaacaaaggaaccccgattaaggcattgaaatattatgataataaacttggaaaccatgttgatgtcacaccagatgacagtaagaatcctgtggttttacaatctataaacccttggagagcagacttatactttaatcctaaaactgctaaatacgaattattaggactgaagtacgctgacttaagttttgaaaaaggaacaggaaattataccatctctcaagaaaaatacgatgaaatcaagaaaagagaaggtatttctgcagaatcagaatttaagtttactctttataaaaacgacctattattaataaaagatattgaaaatggcgaggaacaagtatttagatttttgtcacgtaccatgccaaatcaaaaacattatgttgagttaaaaccctatgataaggctaaatttgatggtgggcaatctttacttactgttttaggaacagttgccaaaggaggtcagtgtctaaaaagtttgaacaaagttggtatttccatctacaaagttaaaaccgatgttcttggttatcagcactttatcaaaaaagaaggaaatcagcctaaactgagctttgaaaatagtattaaacgacataaaaataaatga

SEQ ID NO: 380 - DNA, 3423 bp, Streptococcus parasanguinis F0449
atgaatggtttagttttgggtttggatattggtattgcttcggttggagtaggtattctaaaaaaagatattggtgaaattattcacactaattctcgtctgttttcagctgcaacggctgacagtaatattgaaagaagaggacataggggaggtaaaagattaactcgccggaagaaacatcgtagtattcgccttcatgatttatttgaagactttggtttgttaactgatttttctaaggtgtccattaatctaaatccttatcaactccgtgtacaagggttggataatcaattaactaatgaagagttgtttattgctttaaagaatattgtgaagagacgtggtattagctatttggatgatgcttctgaggatggcggtacagtatcgtctgattacggtaaggcagttgaagaaaatagaaaattacttgctgaacaaactcccggacaaattcaactagatcgtttcgaaaaatatggtcaggttagaggagatttcaatgttgtagaaaatggtgaaaagcgcagattaatcaatgtttttacaacatctgcttatagcaaagaagctgaaagaattcttagaaagcaacaagaattcaataaaaagattacagatgagtttatagaggattatctaacaatccttacgggaaagagaaaatactaccatggaccaggtaatgaaaagtcacgcaccgattatggaaggtatactactaagaaagatcctgaaggtaagtacataaccttagataatatttttggtattttaattggtaaatgtacattttatcctgatgaatatagagcttcaaaagcttcctatactgctcaagagttcaacttactaaatgatttaaataatttaactgttccaacagaaaccaagaaactgagtgaggaacaaaagaagacaattatcaagtatgcgaagacagctaaaacattaggagcttcaacactattgaagtacatcgctaaattaattggtgcctcagttgatcagatacatggataccgtattgatcccaataaaaaacctgagatgcatacttttgaaacctatcggaaaatgcaatcattagaaacaatcagcgtggaagaattaccgagaaaggtcttagatgagcttgcccatattctaactttaaatacagagcgagagggaatagaagaagcaattaacgcgacgctaaaagatacatttagtcaggatcaagtacttgaattggttcaatttagaaaaaataatagcagtctatttagtaagggatggcatagtttttctctaaaactcatgatggagttgattccagaattgtatgagacttcggaagagcaaatgacaattcttactcgattaggcaaacaaaaatctaaagagacatcaaaacgaaccaagtatattgatgaaaaagaattaacagaagaaatctataaccctgtggtagcaaaatctgtcagacaagctataaagattatcaatgaagcaactaaaaaatatggtatctttgataatatcgttattgaaatggcacgtgaaaataatgaggaagatgcaaagaaagagtatatcaagcgtcaaaaagcaaatctagacgagaaaaatgcagctatggaaaaagcggctttccaatacaatgggaaaaaagaattaccggataatgtttttcatgggcataaggaattagctactaagattcgtttatggcatcagcaaggagaaaagtgtctttacactggtaagaatataccaatttcagatttgattcaaaatcagtataagtatgaaattgatcatattttacccttgtctctttcttttgatgatagtttatccaataaagtattggtacttgctacagcgaaccaagaaaagggacaacgtacaccgtttcaagctttagatagcatggatgatgcctggtcttaccgtgagtttaaatcatatgtaaaagattctaaattattaggtaataaaaagaaggaatatcttttaacggaagaagacattagtaagattgaggtgaaacagaaatttattgaacgaaatttagtagatactcgttattcttctcgcgttgttctaaatgctctacaagatttttataaggagcatcaattcgatacaactatttcagtggtacgtggacaatttacttcgcaactcagaagaaagtggggacttgaaaaatctcgtgagacctatcaccatcatgctgtagatgctttgatcattgctgcatctagtcaattaagattatggaaaaaacaaaataatcctttgatctcttatacagaaggtcaattcgtggatcaagtaactggtgaaattatttcattgagtgacgatgaatataaagagttagtatttaaagcaccatatgatcattttgttgatacattgaagtccaagaaatttgaggatagcattctattttcttatcaagtagattcaaaatataaccgaaagatttcagatgcaacaatttacgcaacaagaaaagcaaaattagataaagagaacaaagaatacacttatactttaggaaaaataaaagatatctatgctttagggacaaaaagtccttctaaaacgggattttataaatttttagatttatacaataaggataaatcccaattcttgatgtttcagaaggatagaaaaacttgggatgaagtgatagagaagataatagaacaatatcgaccatttaaagaatacgatgaaaatggaaaagaagttgatttcaatccttttgaaaaatatagaattgaaaatggtcctattcgcaaatatagtaaaaaaggcaatggtccagaaattaaaagtctaaaatactacgataatcttttagggaaatttgttgatataactccttcagaaagtaagaatcctgtagctttgctttctttgaatccttggagaacagatgtatactacaatacagaaacaagcaaatatgaattcttaggattaaagtatgcagatttgtgtttcgaaaaaggtggtgcttacggaatttcagaagttaaatataataaaataagagagaaagaaggaattggtaaggaatctgaatttaagtttacactatataagaatgatctaattttaattaaggatactgaaacaaattgccaacaaatctttagattttggtctcggacagggaaggataatccaaaaagctttgaaaagcataaaatagaattaaaaccttatgaaaaagcaagatttgagaaaggagaggaacttgaggtattaggaaaggtaccaccttcttctaatcaattacaaaaaaatatgcaaatagagaatctttctatttataaagttaaaacagatgttttgggtaataaacatttcatcaaaaaagagggtgaagaaccaaaactcaaattttaa

SEQ ID NO: 381 - DNA, 4158 bp, Streptococcus salivarius K12
atgactaagccatactcaattggacttgatattgggacgaatagtgttggatgggctgtaataactgatgattacaaggttccatctaaaaaaatgaaagtcttaggaaatacgagtaaaaagtatatcaaaaagaacctgttaggtgcattactctttgactctggaatcacggcagagggaagaagattgaagcgtactgcaagaagacgttatactagacgtcgtaatcgtatcctttatttgcaggaaatttttagcacagagatggctacattagatgatgctttctttcaaagacttgacgattcatttttagtccctgatgataaacgtgatagtaagtatccgatatttggaaacttagtagaagaaaaagtctatcatgatgaatttccaactatctatcatttaaggaaacatttagcagatagctctaaaaaagcagatttgcgtctagtttatcttgcattggctcatatgattaaatatagaggtcacttcttaattgaaggagactttaattcaaaaaataatgatcttcagaagaactttcaagactttttggacacttataatgcaatttttgaatcggatttatcacttgagaatagtaaacaacttgaggaaattgttaaagataagattagtaaatcagcaaagaaagatcgtattttaaaactctttcctggggagaagaattcgggtattttttcagagtttctaaagttgattgtaggaaatcaagctgactttaggaaatattttaatttagacgaaaaaacttccttacagttttctaaagaaagctatgacgaagatttagagactttgttaggtcacattggagatgattacagtgatgtctttctcaaagccaaaaaactttatgacgctattcttttatcaggtattctgactgtaactgataatggtacagaagcacctctttcttctgctatgataatgcgatataaggaacacgaagaggatttggccttactaaaggcatacataagaaacatttcgctagaaacgtataatgaagtatttaaagacaatactaaaaatggttatgctggttatattgatggaaaaacaagtcaggaagatttctatgtatatctaaaaagactattggctggtcttgaaggtgcggactattttcttgaaaaaattgatcgagaagactttttaagaaagcaacgtacatttgataatggttcgataccatatcagatttatcttcaagaaatgagagcaattcttgataagcaagctaaattttatcctttcttggctaagaataaagaaagaattgagaagattttaaccttccgaattccttattatgtaggtccacttgcgagagggaatagtgacttcgcttggtcaataagaaaacgaaatgaaaaaattacaccttggaattttgaggacgttattgacaaagaatcttcggcagaggctttcattaatcgaatgactagttttgatttgtatttgccagaagagaaggtacttccaaagcatagtcttttatacgaaaattttacagtatataatgaattaacaaaagttagatttatcgccgaaggtatgagagattatcaatttttagatagtaagcagaagaaagatattgttcgactttattttaaaggtaaaaggaaagttactgataaggatattattgaatatttacatgcaattgatggatatgatggaattgaattaaaaggcatagagaaacagtttaattctagtttatctacttatcacgatcttttaaatattattaatgataaagagtttttggatgatagttcaaatgaaacgattatcgaagaaattatccatactttgacaatgtttgaagatagagagatgataaaacaacgtctttcaaaatttgataatatttttgataaatccgttttgaaaaagttatctcgtagacattatactggctggggtaagttatctgctaaactaattaatggtattcgtgatgaaaaatctggtaatactattcttgattacttaattgatgatggtgtttctaaccgtaatttcatgcaacttattcacgatgatgctctttcttttaaaaagaagataaagaaagcacaaattattggtgacaaagataatattaaacaggtcgttaagtctttgccaggtagtcctgcgattaaaaaaggtattttacaaagtataaaaattgtagatgaattggttaaagtaatgggaagggaacctgagtcaattgttgttgagatggctcgtgaaaatcaatataccaatcaaggtaagtctaattcccaacaacgcttgaaacgtttagaagaatctctcaaaggcttaggtagtaagatacttaaggaaaatgttcctacaagactttctaaaatagacaataacgcacttcaaaatgatcgactttatttgtattatcttcaaaacggaaaagatatgtataccggagaagaattagatattgatagattaagtaattatgatattgatcatattattcctcaagcttttttgaaagatgattctattgacaataaagtacttgtttcatctgctagcaaccgtggtaaatcagatgatgttccaagtttagaggttgttaaaaaaagaaagacactttggtatcaattattgaaatcaaaattaatttctcaacgaaaatttgataatctgacaaaagctgagcgaggaggtttgtcacaagaggagaaagctgggtttattcaacgccagttggttgaaacacgtcaaataacaaaacatgtagctcgtttacttgatgagagatttaataataaaaaagatgaaaataatagaacgttacgaacagtaaaaattattacattgaaatctagcttggtttctcagtttcgtaaggattttgaactttataaagttcgtgaaatcaacgattttcatcatgctcatgatgcctacttgaatgctgttgtagcaagtgctttacttaagaaataccctaaactagagccagaatttgtgtacggtgactatccaaaatacaatagttttagagaaagaaagtcagctacagaaaaggtatatttctattcaaatatcatgaatatctttaaaaaatctattcctttagctgatggcacagttattgacagaccacttattgaggtaaatgaagagacaggtgaatccgtttggaataaagtggcagacctaaatactgttagaaaagtcctttcatattcacaggttaatattgtcaaaaaagttgaggaacaaaatcacggattggatagaggaaaaccaaagggattgtttaatgcaaatctttcctcgaaaccaaaaccaaatagtaaagaaaatttagtaggtgctaaagagtaccttgaccccaaaaagtacggagggtatgctggaatttctaattcatttgctattcttgttaaaggtacaattgaaaaaggtgctaagaaaaaaataacaaatgtactagaatttcaaggaatttctattttagataggatttattatagaaaagataaacttaattttttacttgaaaaaggttataaagatattgagttaattattgaattacctaaatatagtttatttgaactttcagatggttcacgtcggatgttggctagtattttgtcaacgaataataagaggggagagattcacaaagggaatcagatttttatttcacagaagtttgtgaaattactttatcatgctaaaagaataagtagcacatttaatgagaatcatagaaaatatgttgaaaatcataaaaaagagtttgaagaattattttactatattcttgagtttaatgagaattatgttggagctaaaaagaatggtgaactcttaaaatctgcctttcaatcatggcaaaatcatagtatagatgaactctgtagtagttttataggacctaccggaagtgaaagaaagggactatttgaattaacctctcgcggaggtgctgctgattttgaatttttaggtgttaaaattccaaggtatagagactataccccatcatccctattaaaagatgccacacttattcaccaatctgttacaggcctctatgaaacacgaatagaccttggcaaactaggagaggattaa

SEQ ID NO: 382 - DNA, 4179 bp, Streptococcus sanguinis SK330
atggaaaacaaaaattactctatcggactcgatatcggaactaacagcgtcggatgggccgtcattacggatgactataaggtgccatcgaaaaagatgaaagtttttggcaatactgataaacactttatcaagaaaaatctaattggagctttattatttgatgaaggggctactgctgaagatagacgtctaaaacgaacagcgcgccgtcgctatacccgtcgaaaaaatcgtcttcgctatcttcaagaaatcttttctgaggaaataagcaagttggatagtagtttctttcatcgattagatgactcttttttagttcctaaggataagagaggaagtaaataccctatttttgctaccttggaagaagaaaaagaatatcataagaaattcccgactatctatcatttgagaaaacacctggcggactcaaaagaaaaaactgacttgcgcttaatctatttggcattagctcatatgattaaataccgcggacattttttatatgaagaatctttcgatattaaaaacaatgatatccaaaaaatttttaatgaatttataagcatttacgataacacctttgaaggaagttcacttagtggacaaaacgcacaagtagaagcaatttttactgataaaattagtaaatctgcaaagagagaacgcgttctaaaactcttttctgatgaaaaatccactagtctcttttcagaatttctcaagttaattgtaggaaatcaggctgattttaaaaaacattttgacttagaagaaaaagctccactacaattctctaaagatacctatgatgaggatttggaaaacttactcggacaaattggagatggttttacagaccttttcctagttgctaaaaaactctatgatgctattcttctatcaggaattttgactgtcacagatccttcaaccaaggccccactatcagcatctatgattgagcgctatgaaagccaccaaaaagacttggcagctttaaaacaattcatcaaaaacaatcttccaaaaagatataatgaagttttttctgaccaatctaaagacgggtatgctggatatatcgatggcaagaccactcaagaagcattttacaaatatatcaaaaatcttctctctaaattcgaaggagcagattatttccttgataaaattgaacgtgaagattttttgagaaaacagcgcacctttgataatggttctattcctcatcaaattcatcttcaagaaatgaatgccattctccgtcgacaaggagaacattatccatttctgaaggaaaacagagaaaagattgagaaaatcttgaccttccgtattccttactatgttggtccattggctcgtggcaatcgtgattttgcttggcttactcgaaattctgaccaagcaatccgaccttggaattttgaagaaattgttgataaagcaagctctgcagaagaattcatcaataagatgaccaactatgatttgtatttaccagaggaaaaagttctgcctaagcacagtctgttgtatgaaacatttgctgtctataatgaattaacaaaagtaaaatttattgcagaaggattgagagattatcaatttcttgatagtgggcagaagaagcaaattgtcaatcaattattcaaagaaaaaagaaaagtaactgaaaaagacatcatccattatctacataatgttgatggctacgatggaatcgaactaaaagggattgaaaaacaatttaacgcaagtctttctacttatcatgatttgctcaagattatcaaggataaagagtttatggatgaccctaaaaatgaagagattcttgaaaatatagtccatactctcacaatatttgaagatcgtgagatgattaagcaacgccttgctcaatatgactccatctttgatgaaaaagtgattaaagcactgactcgtcgacattatactggttggggaaaactctctgccaagctgattaacggtatctgtgataaacagacaggagatacgattcttgactacttgattgatgacggtaagatcaatcgcaactttatgcagttaatcaatgatgacgggctttctttcaaagaaattatccaaaaagcacaagtagttggtaaaacagatgatgtgaagcaagttgtccaagaacttccaggcagtcctgctattaaaaaaggaattttacaaagtatcaagattgttgatgagcttgtcaaggttatgggctatgctcctgaatcgattgtaattgaaatggctcgcgaaaatcagacaactgccagagggaaaaagaattcacaacaaagatataaacgtattgaagactcactgaaaaatctagcacctggacttgattcaaacatattaaaagaaaatcctacagataatattcaacttcaaaatgatcgcctcttcctctactatctccaaaatgggaaggatatgtacacaggaaaacctcttgatattgaccaattgagtagctatgacattgatcatatcatccctcaggctttcattaaggatgattcgatcgataaccgtgtcttgactagttcaaaggataatcgtggtaaatccgataatgttccaagtttagaggttgttcaaaaaagaaaagctttttggcaacaattgttggattccaaattgatttcagaacgtaaatttaataatttaaccaaagctgaacgaggtggactagatgagcgtgataaagttggctttatcagacgccaactagttgaaacacggcaaataacaaaacatgttgcacagattttggatgccagtttcaatacagaagtgaatgagaagaaccagaaaattcgtaccgtcaaaatcatcactttgaaatccaatctagtttccaacttccgtaaagagtttgagttatacaaggtacgggaaatcaatgactaccaccacgcgcatgatgcctatttaaatgcagtagttgctaaggctatccttaagaaatatcctaaactagaacctgaattcgtctatggtgactatcaaaagtacgatcttaagagatacatctcaagattcaaaccctctaaagaaattgaaaaagcaactgagaagtatttcttttactcaaacttgttgaatttcttcaaagaagaggtgcattacgcagacggaataatcgtaaaaagagagaatatcgaatactccaaggacactggagaaatcgcttggaataaggaaaaagatttcgcaacaatcaaaaaagtactttcctatccacaggtgaatattgttaagaaaacagaaattcagacacatggtctagatagaggtaaacctaaaggcttgttcaattctaatccatctcctaaaccgtcagaagatagtaaagaaaatcttgttccaattaaacaagggcttgatccacggaaatacggtggttacgctggtatttctaactcgtacgcggtcttagttaaagctattgttgaaaaaggagcgaaaaaacaacaaaagacaattcttgagtttcaaggtatctctattttagataaaataaactttgaaaataacaaagaaaactatcttcttaaaaaaagatacatagagattctatcaactattactttacctaaatatagtttgtttgagtttcctgatggtacaagaagaagactggcaagtattctatcgacaaacaataaacgaggagaaattcataaaggaaatgaattagtacttcctggcaaatatactacacttttgtatcatgctaagaatattaataaaaaacttgaaccagagcacttagagtatgttgagaaacatcgaaatgattttgctaaacttttagagtgtgtacttaattttaacgataagtatgtaggcgcattaaaaaatggagaaagaatcagacaagcatttactgattgggaaacagttgatatcgaaaagttgtgtttcagtttcattggtccagaaaatagtaaaaatgccggattattcgagttgacctcacaaggaagtgcctctgattttgagtttttaggagtaaaaattccacgatacagagactatgcaccgtcatcgcttctcaaggccaccctcatccaccaatccatcactggtctttacgaaactcggattgacttgagcaaactaggagaagactaa

SEQ ID NO: 383 - DNA, 3387 bp, Streptococcus vestibularis ATCC 49124
atgagcgacttagttttaggacttgatatcggtataggttctgttggtgtaggtatccttaataaagtgacgggagaaattatccataagaattcacgcattttcccagcagcccaagcggaaaataatgtagaacgtagaacaaatcgtcaaggaagacgattgacacgacgtaaaaaacatcgtagagttcgtttaaatcatctatttgaggaaagtggattaatcaccgattttacgaaggtttcaatcaatcttaacccatatcaattacgggttaagggcttgatcgatgaattgtctaatgaagaattgtttatcgctcttaaaaatatggtgaaacaccgtgggattagttatctcgatgatgccagtgatgacggaaattcatcagtaggagactatgcacaaattgttaaggaaaatagtaaacaattagaaactaagacaccgggacagattcagttggaacgctaccaaaaatatggtcaattacgtggtgattttactgttgaggaagatggaaaaaaacatcgcttaattaatgtctttcctacatcagcttatcgttcagaagccttaaggatactgcaaacccaaaaagaatttaatccacagattacagatgaatttattaatcgttatctcgaaattttaactggaaaacggaaatattatcacggaccaggtaatgaaaagtctcggactgattatggaaggtatactactaagaaagattctgaaaatgagtacataactttagacaatatttttggtatcctaatcgggaaatgtacattttatccagaagagtatagagcagcaaaagcatcctacacggctcaagaattcaatttgctaaatgatttgaacaatctaacagttcctactgaaaccaagaagttgagcgaagaacagaagaatcaaatcattaattatgtcaaaaatgaaaaggcaatggggccagcgaaactctttaaatatatcgctaaactactttcttgcgatgttgcggatatcaagggataccgtatcgacaaatcagataaggctgagattcatactttcgaagcctatcgaaagatgaagacgcttgaaaccattgattttgagaaaatgtcaagagaccaacttgataagttagcctatgtcttgacattaaacactgagagggaaggtattcaagaagccttagatcatgagtttgctgatggtaactttagccaggagcaaattgacgaattggttcaattccgcaaagcaaatagttccatttttggcaaaggatggcataatttttctgtcaaactgatgatggagttaatcccagaattgtatgcgacgtcagaagagcaaatgactatcctgacacgacttgggaaacaaaaaacaacttcgtcttcaaataaaacaaaatatatagatgaaaaactattaactgaagaaatctataatcctgttgttgctaagtctgttcgccaagctataaaaatagtaaatgcagcaatcaaagagtatggagactttgacaatattgtcatcgaaatggctcgtgaaacaaatgaagatgatgaaaagaaagctattcaaaagattcaaaaagcaaacaaagatgaaaaagatgcagcaatgcttaaggctgccaaccaatataatggaagggctgaattaccacatagcgttttccacggtcataagcaattagcgactaaaattcgcctttggcatcagcaaggagaacgttgcctttatactggtaaaacaatttcgatccatgatttgataaataatcctaatcaatttgaaatagatcatattttacctctttctatcaccttcgatgacagtcttgctaataaggttttggtttatgcaactgctaaccaagaaaaaggacaacgaacaccttatcaggctttagatagcatggatgatgcatggtctttccgtgaattaaaagcttttgtacgtgagtcaaaatcactttcaaacaagaaaaaagaataccttcttacagaagaggacatttcaagatttgatgttcgcaagaaatttatcgaacgaaatcttgtagatacaagatacgcttcaagagttgtcctcaatgcccttcaagaacactttagagctcacaagactgatacaaaagtttccgtggttcgtggtcaattcacatctcaattgagacgccattggggaattgagaagactcgtgatacttatcatcaccatgccgtagatgcactgattattgctgcttcaagtcagttgaatttgtggaaaaaacaaaagaatacccttgtaaattattcagaaaaccaactacttgatattgaaactggtgaacttattagtgatgatgagtacaaggaatctgtgttcaaagccccttaccaacattttgttgatacattgaagagtaaagaatttgaagacagtatcttattctcatatcaagtggattctaagtttaatcgtaaaatatcagatgccaccatttatgcaacaagacaggctaaagtaggaaaagataagaaggatgaaacttatgtcttagggaaaatcaaagatatctatagccagactggctatgatgcctttataaagatttatcagaaggataagtcaaaattcctcatgtatcgtcacgacccacaaacctttgagaaagttatcgagccaattttagagaactatcctaataaggaaatgaatgaaaaagggaaagaagtaccatgtaatcctttcctaaaatataaagaagaacatggcgactatattcgtaaatatagtaaaaaaggcaatggtcctgaaatcaagagtcttaaatactatgatagtaagttaggtaatcatattgatatcactcccaaagatagtaacaataaagttgtcttgcagtcagtttctccatggagagcggatgtctatttcaataagactactggaaaatacgaaatccttggattaaaatatgctgatctacaatttgagaaagggacaggaacatataagatttctcaggaaaaatacaatgtcattaagaagaaagagggtgtagattctgattcagaattcaagtttacactttataaaaacgatttgttgcttatcaaagatacggaaacaaaagaacagcagctattccgtttcttatctcgtactaaacctaatgttaaacactatgtagaattaaaaccttatgataaacagaaatttgaaggaaatgaatcgttaataaatgtactaggagctgtagctaaaggtggtcaatgtcaaaagggaataaacaaacccaatatttctatttacaaagtaagaacggatgttctaggaaatcagcatatcatcaaaaatgagggtgataagcctaagctagatttttaa

SEQ ID NO: 384 - DNA, 4101 bp, Lactobacillus composti DSM 18527
atgacaaaagactatagtttaggcttagatattgggacaggcagtgtgggtttcgctgccttagacaccaattatcgcttgttgcgggctaagggcaataatgttattggggtgcgcttgtttacgccagcggagactgctgaagaacggcggggctttcggacagcacggcgacgtttaagtcggcggcgctggcgcctgggggcattgaacgggatattcgccccagaattagctaaggtggatcctaactttttgcatcggttaaagtacgcttgggtgcatccagcagatcaacaaaacaaaggtaaatattccgccgcgcctttgtttaacgatgctgcgctggaccgccaatttcatgatgactatcccaccatttatcatttgcggctaaagttaatgacggatacttcacaacatgatttaagagaagtttatttggctattcatcatattatcaagttccgggggaactttctcagaggggaagggccaattaatgccagcgaagcctttgacattaatacttttattgaccaaatgaccgctttttatgatcaagccttcccagatttcaagattgtggatcaagtggaccaacaaataatctttaaagggttaacggacatgacgttgtcccctgcagatcgggccaataaggcccttatggggtttaataacgctgcccagcaacctaataagagaatatttaaggctattttaagcggccttgtggggaatcaagtggacttaatggctatttttcagttagatgggattcccaaagaagaccaaaaagaatttaaattcaaatttgttgacaacgatatcgaagagaagctggcggctctcggggataatccggctttatctgatgaacaaaacgaatttttgacaacgctttatgccgccttcagtggcttgactttaaagggcttattgggggatgctacctcgatttcagctgctatggtggctcgctacgctagccatcgcaccgactggacctatatcaaagaccacgttttaacaccgcagaataatcgggaattgcgtctggcttatgccgacttgatgactgacaacgaagacgtgcgattgaaagcgggcaagaagttcgctaaagccattgaggcagctgatatcccagcggctaaaaagtcggaattttcactgaaaatcgacaataatgaattcttaccccgccaaagaaccaaagcaaatggtacgattccccaccaactccatttaaacgagttgcagcaaattattgaaaatcaggggcaatattatcccttcttaaaagccacttttgagcaggatggccatactttgaataaaattgaaggtttggtgaagtttcgcgtcccttattacgtggggcccttggtgcccaagcacaaggtggcggggaataacgctaatcattggatggttcctaaagaacctggcgccatcactccttggaactacacggaaaaagttgatcgggacaaatctgggaatgaatttattcggcgcatgactggtaccgatacttatctgttaggagaacccaccttacctaagaattctctggtctaccaagaatttaatgtgttacaagaattgaataatcttcgcatcgaaaagcgccgcttagatattgctgtgaagcaagatatttttgaacatgtttttaaaaccaataaaacagttacagtcaaacgcattgaagaatatttgaccacagaatttggcagccccgtaacattgagtggctttgctaatgtgaacgaacgcaaattaaacagctcgctgagcacctaccattattttgtggggatatttggcgctgagtttgtagatgaccctaaaaacttaacactcttggaacaaattgtggaattacaaacggtttttgaggaccgtaaagcgttacaacgtcaattgaaattgcgaccagagttgtcagaaaagcaggtcaaacaactggcccggacgcattacactggttggggtcgactatcccaaaaattattgaccagtaaaatcgttcacgtggctttagagggtgagcgggaaccagggcaatattcaattttagaaacattatatggcacacaaatgaactttatggaaattgtgaatgatatgaaggaccgatatggggtcaagtcttggttggaccaggaaaatagcggttccgaaaataatctgagtttgaaacaacggattttagatatgcctgggccgaagaatattaaacggggtatcaatcaagcctttcatattatcgatgaaatcacccgggccgtggggaacgcccccagccggatttatatcgagtttgcccgggaaagccaacagtctaatttaaccaatgcccgggtcaaccgactgaaacaactttatagcaatcaggctctgaaaaaagaatttgccaagctggctagtgaaataaaagacctcaccaaagaacaattaaaggacgatcggttgtatctatattatctgcagcaaggcaaagatatgtacactgagactgatatcgatataactaaaatttccagtaactatcaaattgatcacattattccgcaagcctatacgaaaaataatagtttggataatcgggtactggtcaattcagagatgaacgcccgtaaatcagattcaccgacatttttgcccagccttattcaagagcgcaaagcttggtggcggcagttaagggacaccgggttgatgagtaccattaagtataataatctaacccggacatccgatgatttttccgctgaccagaaagaacgtttcattgctcggtctttggtagaaactcgacaagtgatcaaaaacgttgcaacgttgattaaagagtattacgacgattctcaagttgaagctctaccttctgaaatcactgctgaaatgcggcgctatttgaatgttcgtaagaatcgagatatcaatgattatcaccatgcccatgatgccttattattcgccacagccggtgaatttagccgtaaggtgggtattatggagaaggggcgtgttagcgacggggctgggaatatctacaatcgatataccaaagatattatccaacgggcccgggcaaaagccggtcaggataagaaagttcgaccgtttacttttattgtggggtcaatggctaatcctgacacgaagtttcaaaccaatcaaaccaccggtgaaattgtctggacgccggaggatgtggcttatttacggaaagtcatcgattataaaaagatgctggtgactaaaatgaccttggaccaaaccgggacactctataatgagacccgctatggtagtggggataagcacgtggcagttgcgttaagtaaagataaagcagctgacttatatggtggttttggttctctgaagccagcttacgctgctttggtatattccaagaagaaattccgcctagtaaatgtactgcgtctctggttaccggaaattaaaaagaatgccagtgttcttgaaagaaaggtgcaatctgtgcttggagatgacaacgcgaaagtcattcgcgcccacgtaccttgtggacaattattgattaaagatggtgcattagttacggtctcctcagctactgagttgcataatttccgacaactatggctaccaaaggcagattatcaagatatttcgattctgcttggggcgccggataaagtaacagctgagaatcgactgcaggctgaatcgcactttgatgatgtggatcagcggtttgaaagtttgttgaaggatgttattgatcaagcacggcaatactatccgttgaagactcatcaaactagcttagaaaaactgattggtaaaatcggtaaatttgatgagttgaaatttgctcaaaaacaacaagtatttagtaggttattaagcgcgttacatgccaatgcaactaatagtgacttgaaacagattggtttgtcaactgcctggggccggcttatttatcctaaaggtgtttcactgactgatgaagataaattaattaacagttcatttactggattgtttaatgacgttatgagtatcaaagaatttcacgatttttcaatcaactaa

SEQ ID NO: 385 - DNA, 4101 bp, Lactobacillus concavus DSM 17758
atggataaaaaatataatattggactagatatcggaacaagttccattggattcgtggcgaccgatgaagacaaccatgtgattcgtgcgaaaggcaagaatgtgattggcgttcgcttatttgatgaaggtcaatctgctgcggaacgacgcggctttagaacaactcgacgccgcttgaaccgacgcaaatggcgcttgaatttgttgcgcgaaatattcgagccacacatttatcccattgacgcttcttttttcatgcggcaaaagtactcaaacttatctaaacaagatcctaatcagaagattgagtttaaggatattttattctcggataagtcggatgccgagttttatcgccaatacccgaccatttatcatctgcgtcaggctttgatgactgagaaacgacaatttgatttgcgtgagatttatttggcgattcatcatattgttaaatatcgtgggcatttcttggatgaaacgccgacagataaattctcgttcgatcaattagatctgactcaagagtttgaacgcctgaatgtgttgttttcggaacaaaatccggaagaaccatttgaaattgtcgtcaatcaaaatcaatcgattgaggacatcctttctaatcaaagtatgactgcgagtgatcgacgcaagcaagcgctggttgttttctatcaacaatcagagaacaaagagaacgagaagcagtacaaagcaatcgccacagaaattctaaacctcttgttgggtaacaaagccaagttaaatgttatcttggcacaagaggtcgataaagaagcagccaaggattggtcattgtcgttgtcttccgagacgtttgatgatgatcttgaaaaggcttcgagtggtctaaacgacagtcaactggaaatggtcggcatctttgagcgcatttattcatcgctaattttgaagtcgatcataggggatcacaacagtttatctgctgccatggtcgataaatttaagacccatgcacagcatcgcgatttattaaaggatgtcatcaaaaacagcgatgcaactaaaggcgagcaattgcagtttgcctacgatcactatttacaacgtcattctgcagatggtaaagcttacggaaaagatgatttttacaaggaggttaagaaaaatcttgatgactccgatgcggcgcaacaaattcagcaattaattgacaccgaccagttcatgccaaagcagcgtaccaaggcaaacggtgcgattcctcaccaagtgcagcagaaagagctggacttgattatcgagaatcagtgccaatactatccttggctagcagaggagaaccccaactcagaacgtcataacgttgccaagtacaaactggacgaattggtctcgtttagagtgccctactacgttggacctctaatttcgccggctgacgatgagacagatccacaagcaattcagaatactaagtttgcgtggatgattcgcaaagatgctcagggtcgaattacgccttggaatttcgatgataaggtcgatcgcgaaaagagtgccgacaagttcattaaaagaatgacaactacagatacttacttgattggcgaagacgtgttgccagatcaaagtttgatttaccaacgctataaagttctgaatgaactaaataacgttcgtattaatggccggccaatagaagttcagatcaagcaaaacatttacacggatttgtttaagaagtttaagtcagtctcggttaaaaagctacgcagttatttggaagaaatgagctattaccctggttcttttaaaattagtggtctcacgaatccgggtaaatttgataatgggttgacatcatatcttgattataaaaatattttaggcgatagcgtcgatgccaatgataaacgtgctgacattgagcaaatgattgaatggtcaacgatttttgaagacaacaagatttttgcacaaaaattggaaagtatgacttggttaaccgcagaacagcgtaaagcaatttcccgcaagcgatacactggttgggggagattatcgaacaaattattgacccagctgaagaatcaggataatcgctcgatcatggacttactctgggaaacagaagagaacttcatgaagattcagtccgccccagatttttcaaagatgattgaagcacataaccagcaattcattaaaaatgaagctaacattcaacaagtcatctcagatttatatacttcgccacagaataaaaaagccattcgccagattttattagtcgttgacgatattcaaaaagcggtgggacacgcgcccgagcatattgcaatcgagtttgcaaagggtgaggataagaatcctagacgtacgatcagtcgtgaaatgaaaatccaagatgtttatcaacaaatctccgatgatattctcgtctcgccagaggtcagagcgcaacttaatgagaaaattgaaaatcgtcatgggcgtctgagtgatcgacttttcctgtatttcatgcagggtgggcgagatatgtatactggcaagccaatcaatattaataatatttcacattatgatattgaccacatcttgcctcaggcatttatcaaggacgactcgctggataatcgtgtacttgtcagtgacaagcttaatcgagagaaatctgacactgtaccacgtgatttatttggtcgcgaaatgatgtcgacttgggaaaagatggctgatcgtggactgatcacgaaacgtaagttggccaatctgaaaacaattccaggcagtattgacgcccacaaggcacaaggcttcatcaaccgtcaacttgttgaaacgcgtcaggtgatcaaactcgctgttggaattatgattgatcaatatcctgaaactcagattgtttcagttaaggctaatttgacccacgaaatgcgcgaaatgtttgatttggttaaaaatcgtgatgttaatgactaccatcatgcttttgatgcgtatttaaccgcttttgtaggtaattatttgctgcaacgttatcctaagcttgagccgtattttgtttacgacaagttcaagaaattaaaagatcaaaacatatccatgcgcgattttaatttgttgtatgacctaaagaagaatgaagacgtttatgatcagcgtactggtcactctgcacataaaatctgggaccagcacggaagcatcgactacattcgccacttattcgcatacaagaaaatactcgtgagccatgaagtgcatcagaatggtggcgcgctctacaatatgacggtttacggcaaagccgatgatgccaaacggaaattgattccaattaaagctgataaaccaacggagctctatggtggctacaccagccggaaacttgcttacatggcaatcgtaaagaccaagaagggaaagaaagaacagtatcaagttactggggttccggtttctgctttgacaacattacgccaatttaaggaagattcaccagaacagaaacaagcgctcgaagaaatcgttcgacgtaattttgatgaaaaaactgaagttgaaataattgtccctaaggtattgtttaatcagttgattgttgacgagaagtgcaggtttatggtcgggagcgatacgtatcgatataatgcgcagcaactagttttatcagctgatgatctagagattattaatgcctcacataaagacattcaaacgatagattcaagtgattactctcaacagcttgatcaagtttatcaaaatattttaacaatagtggacaagcattttccgatgtatgatattaataagtttcgaactaaattacatgatatttatgaacaatatattgaacttccaaatgaggatgtgtgggagaacaataaactaacaactttgggtaaacacactataatcattcgaattcttcagggattacatgctaatgcaaccgtagtagatttaaaacagttgggaattaaaactccatttggattcatgcaacaagctaggggaatagtggtttcacctgatgcccagttaatctatcaatctccgacgggtctttatgagcggcgtgttcgtttaggcgatttataa

SEQ ID NO: 386 - DNA, 3960 bp, Weissella halotolerans DSM 20190
atggcatatagtgtaggtcttgacattggtgtgggttcagttggctttgctgggattgataatcaatacaacctagttagaacgaagggtaaaaatgtgattggggtgcgcctatttgatgaggcagactcggcagcagaacgaagggggcataggactaatcggcggcgtttgcagcgccgacgttggcgactacgcttgttagatgacatctttgcaaaacccttacaagcggttgatcctaatttcttagctcgtttgaaatatagctatgtcaataaaaaggaccaggggcaacaggaccattattatggtggttacgtatttgggagtaccgcagcggatcaagcatatcatcaagcgtatccaactatttatcacttgagaaagagattaatggaagatgaccaaaaacatgatttgcgggaggtatatctggcaatccatcatattgtgaaataccggggtaactttttgaatcctcaatcctccttggatattgatcaacagtttgatgttactgattttgctcaggcattagctcgttttgcggatcatcaggcattaagctgggccttggaagctccaatacgtttcttggaggctgaattagcgactggcttgagtaatagtgcccgggtagatgccgccatagaagcctttagctttgatactaaagtggatcgagctgccatcaaggaaatgctgaagggacttagtggtaaccaaattgactttactaaactctttgtgaatgttgattcagctgattgggatcaggaagaacgaaagcaatggaaaatgaaactttctgaagaagactttgatgagcaggccttgccaatcttagaacgacttagccaggatgaaacagaattctttttggccattaaacgagcatatgatgggattgctttgatgcgttttttgggagatgagcaatcactgtcatcagctatgattaaagcctatgaagatcatcgacgggatttaacttttttaaaaacacaagtgcgaacaccgcagaatcgacaagctttatctgaaggctatacaaactacttaagtgtagacgataaaaaacataaacggggggctaaggagctagctcaattgatcgaagctagcgatgccagtgagcaagacaaagcaacgatgttggatcgcattgcgaatgaccagtttgcccctaagcaaaggactaaagctaatggattgattccttatcagttgcatttggctgaactaaagaaaattctagctaagcagggtcagtattatccatttttactggatacctttgctaaacagggccagtccgtaaataagatcgaggaattagttcagtttcgagttccatattatgtgggtccgatggtaccgaagtctgaaacagccgggaatgccgaaaatcattgggtagaaaaaaatgatggccaaacgaaagtgtcggtgacaccatggaactttgatcaagtttttaatcgtgatcgggcagctaaaagttttattgaccgattaacgggcaccgatacctatttaattggtgaaccaactcttccccggcattcactgacgtatgaaacatttacggttttgaatgagctgaataatattcggattgatggtaaacggttaccggtggaaacgaaacaagccattgtggaggaccttttcaaaaaatatcgattagtcactaagaaacgccttcaagattattttgcaagctttggaaaacgtgaggtcgagttaacgggtttggcagatgaaagccgctttactagtagtttgaccagttatcatgacttgcagggcctgctagggactgattttataactaatcctcaaaatcattcactgttggaaaagatagttgaaattcagacagtctttgaagatagtgacattgcagagcgtgaattaggcaagttaggcttagagcaaaaacttattccccgcctggctaaaaagcactataccggctggggtaatttgtcacgtaagttattagacacttcctttattcacgatccagaacggcctgaagagccagtttcaatcatggacttactctatacaacgaataaaaatttcatggaaatcctacatgattcagaatatggggtagaggaatggctaaaaagtcaaaatatgattgatgaccaaaaagatattcaaatgcgaattgatgaattaaccacctcaccagctaataaacggggaattaagcaagcctttaatgtcttggacgatattactcaagcgatgggggaggaaccagcttacgtctatctggaatttgcccgcgaaaaacaggcatcaagacgaacggtttcacgtaagaagcgactggagaccctatataaaaatgcagctttgaagactgaattcaaggctattaaagaagcactggccgaagaatcagatgaccgaatgcaagatgaccggttatacctgtattatgcgcagttgggtcgtgacatgtataccggtcaaagtatcagtattgatcagctgtcaagtcactatgatattgatcatatcgtgccccgtgctttcatcaaggatgattccttggaaaacaaggtcttagttaatcgaactgataatgcacggaagacagattcagccacctttacggccgatgttaaggctaaggcttttccgctttggcaacagttaaaaaaattaggactcatttcggctaaaaaatttaggcttctaacacgaactggcgattttacagagatggaacgcgagcggtttattgctcgacagttagttgaaacccgccaaattattaaaaatgtggcggctttgatagaaggccattttagtcaaacccaggcggtcgccattcgggctgaagtgactggtgaactgcgacagttgacgcaaattaagaaggaccgggatattaatgattatcaccatgcccaggatgctctgctagtagcgacagcaggaacttacctgcaccgtcattttcctaaacgagatgcccggtttatttataatgagtttgattattacacccagcactggctcaagaatcagggagagaaccgccgccggcatccttacagctttgtagtcggtacaatgagcaaaggtaatgaagattggacaccagataatttaaattatctgcgaaaagttatgcagtacaagaccatgctaatgactcggaaaccagtaggaccagaaggcgccctatataaggagactttaatcgcggctgaccctaagaaacgcttggtaggggccagtaaggaacggcaggatccaactatttatggtggctacactaaggaaagttcggcctatatgtctttagttcgggctggtgggaaaaatcagttggtaaagattccggtacggattgctaatgaaattcatagtggccaacgaaagttagacgactatgtgcaagcaaaggtaaaaaagtttgagcgaattctgttacccaagatttcattagggcaactcgtagaagatgagggtcaacgtttttatcttgcaaccaatgaaatgaaacacaatgctaagcagctctggctggatcaaaaggtggtgacaacttataaacgtttaactgctgaaagtccagttgaggattttttgactgtttttgatgctttgactagttcggctactatccaccattttaagttttatcagcgggatcttgaattacttagggacaatcgtgctggctttcaagacttagctaaggcaacgcaattaaaggtgttgaaggatgtgttgtatgagcttcacgataatgctggttggcgagatccaattaagcagtactttaaggaaataggattaaaagtacgcatgtggacaaaacttcagaaggaaggtggcattaaattaacagatcaagcagaacttatttatcaatcaccaagtggtttgtttgaaaagcgacgccgcgttcaggatttgctgtaa

SEQ ID NO: 387 - DNA, 4113 bp, Weissella kandleri DSM 20593
atggaaaaaaataaagagtacgtaattggattagatattgggactggttcagtggggtggtcagcgatatccacggataattatcaattgattcggcaaaagggtaagaatttaattggggtgcgtttatttaatagtgctgaaacggctgaagaacgacgtgggtatcggactaccagacgacgtctttcacggcggcgttggagaatgagtttactgaatgatatttttagacctgagttaaatgaaattgatgaaaattttttggcacgtttaaaatattcatgggttagtccactagatcagaaaaatccgcaattaaatgaacaaggaacgaatgctagtttatatggtgatatagaagctgatcaagcctttcatcgagcttatcctactatttatcatttgcgtaaaacattgatggaagataatcaaaaacatgatttacgcgaagtttatctagcaattcatcatattgtgaaataccgaggccattttttaacaccagattttgatgctaatagtcagactattgatatcaaaggattatttaagcaattaggtgatgtgagtggttctattgagttacaagctgatcaaacatcaacggtaatagcggcttttcagtcgattttgttagacttcactaagacccctactgagagtggacgattagcaggacaactttttagtgatcaaaataaggataaacaggctaagaagcaagttgaagagttgtttaagttattaagaggtggcaagggttcactggcagacatgtttttattaaccgatttggataaggtagtaaaaaatcaattaaaatttgcttttgatgatgcagttgatgaaaatctaaatcttatttccaatctgattaatgaagaacaatatgaactgttattaaacattcagaaattacgtgggactattattttaaagcaaattttaggtgatgatgagacggtgagcgacgctaaagtgcggagttatgaagaacatgctcatcagcttaaggagctaaaggcacaagtactgacgaaagataataaagagaaatttgaagaagcttatcaactaattcaaaaaggggatgcatcacgtattgatggtcttaagaaattgaagacgataattaatcaagagcacgaagccttacgattagataagtatgaggctgataaacttttgaaattaattgagcttgaccaattattaccagtgcaacgttctaagcgaaatggtgaaattcctcatcaattacatgaatttgaattaaagaaaataattgaaaagcaaggccgatattatccttttttgcgagaaacgtttgaacgcgatggtcaggaatttaataagataggacagctggttaattttaggattccttattacgttgggcccttggttgatccaaggttggctggtattcaatcgggtgatcagacgaatcattggatgacgcaaaagaaagcgggaaaaattacgccgtggaattatacggaattgattgatattgataaatctgcggctgaatttattaaacgcatgacggggactgacacgtatcttgtaggtgagccatcattacacaaggccagtttaatttatcaagactataacgttttgcaggaacttaataatttacgttatgacggtaagcccttgccggttgatgctaagcaggaaatttattcaaatttgcaagtgtcattaaagaatgcaacgaagaataaaattaatagtttccttatctctgaggggtatttgcaggatggagaagaattaactggttttgcaggaaaagaattgaagaataaattaagctcgttccattattttaaaaatattttcggccctgaacggatgaacactctggggacagataatttagagaaaattactgaattacagaccgtgtttgaagatcgccatatgttaaaacgccaacttcaaaaattaggatttttagatgatgatgaatgtgaaaagttagctggtaagcatttcactggttgggggaatttatcaaagaaattgttaaatacgccggccattatagatccagagattaatgaaaataaaattagtttaattgatgctttatataaagggcaacggaatcttagcttttatgttaataatatggatgataagtatcaatttcgtgattggattgaaagtgaaaatcaaagtcaacaggttgaaattagtttagatgaaaaaattaaaaatttagcaggatcaccagctattaaacgtgggattacacaaagtatggcagtgattcaagacattatcagagctaataatggaatttcaccaaaaagaatttatttggagtttgcgcgtgaatcgcagaattcgtatcaacctaattcacggataaaacagattgagaaaatttatgatcagaataagaaagagttaatgaaggtatatccagacgtttttaaagatgtacaaggtgtattgaataacgttgatgagaataattctctatcagaaaaagcatttttatatttcatgcaattaggtaaggatatgtataccggggaagctttggattttgacaaattatatacttatgatattgatcatatcattccgcaagctatgactaaagataattcatgggataacaaggtattggtgacagcaattaaaaatcgtgaaaagtctaatcaagttttagataatgctatccaagctaagatgcataatttttggttgcagttaaagaaagtgaatttattgagccaacgtaaatacgatacattaatgaagaccaacttcagcaaaggagacgaaaagaaatttatcgcgcgttcgttagtggaaacacgtcagattattaagaatgttgcagaattaattaagagtgagtttgatcatgttgaggcaattccgattcgacaagagttaacaagcgatatgcgtcagttaatggattataaaaagaaccgattagtgaacgattatcatcatgcccatgacgctctgcttattgcgacggtaggagagtttatgcaaaaacgcggatttatgcaaggaatgaatccatctcaaaatgtttatcatgggtatacgcaatatgttaaaaagtggttgagcatggctaaaaaagcaaggtccgctgaaaaacctgaacgcatttttccattacaattcgtggttggatcaatgcggatggctgtacgtgatggtcaagttgataaggttactcatccagctaccggagagatatgttggacagctgataatgaagcatatttgagaaaagttttgggttataaaaacattttggtgacacgtaaggttaaaaatgctggcaagttatatcaaagagtcacggtgaagcctaaaggtagtggtgaagcaccagttaatcatcaaaaatcagatattaatatttatggtggggtcactagtgaacaggcagcagagttggttttgattcggataaaagcaaagaataatgctaaaaatatggtgattaaaattccaacagctattgctaatcaggttgcaaataagaccactacgtatgatgcgtacgttcgaagcttaaatattccaaattatgctggaattattttggatcagattcctttaggtcaactggtttttgatgaaagaacaagtttttatctggcttctgcagagattaagcataatgctcgtcaactatgggtgaatcaacacattaataacgttttaactaaaaagaatatcaatgacgaggaaagagataatattttaaatttattgaccaatgagaagaatttagagcgatttaaactattagaacctgatttgaaacgggtgaaggcagctaaacaacagtgggcgagctgtgacgatcaagagcagatgcaaatattgaggattattatcaataaaatgcatgatgatgctagtccgcagattccaggaaaaatagacccatttaagaattacctagataagcaagggaaggggtggcgtgatttaagaactaaaaaaggaatgaaacttagtgataatgcagagtttgtttaccagtcaccaactggtttataccatcggaaaatatcaattaacgagttattaaaacaaaagcaattagaatag

SEQ ID NO: 388 - DNA, 4200 bp, Olsenella uli
atgaatcttcgcaatactacagacgagtacaacatcggtctggacatgggcaccaactccgttggatgggcagttacagataaagctggggccatcgcgcacttcaagggcaagcccactctgggtagcaggcttttcgacgcagcgcaaactgctgcaggggcgcgtatacaccgcagccaacggcgtcgttatgttcgcaggcgttggcggctcgaccttctacagagtctcttccaagatgaggtcagcaaggttgactcagagttcttttgcaggcttagacaatcgcgcctgtatgtgggagatagggaaaagggacatgcggattacacatggcccatcttcaatgactcagacttcaacgaagtggattattacaagcgctttcctaccatttaccacctacgcaaatggctgatggaaacggacgagaaagccgacattcgtctcatctatcttgctactcataacatcgtgaagcataggggcaacttcctgcgtgagaacaacaagagtctgagttctcgtgatgcaaatcctgctcaggcggtgaagagtctgcgactggctttgaacgattggtgttcggagcgtgactatgagtgcgcttggaaaggcgaggaagatgatggtgctatcgacgaggccattctcaatgtgctggctgatggcgagaaagggcgcagcgaccaggcaaaggagattgccaagctaactggtgtcgattgtggggacgcaaagcagagcaagcagtgtaacgaggcaatcgctaaggcaatcgtcggactcaaggtggagatgaagaacatcttcggtgagtttcctgctgagaagacatcatacatttatttgtcgtctgacgaagatgtcgaggccgttcgtgaatcctgtcctgatgatagtggagaattgttccaggcgctttgcaagttgtactcagcctacatcttgcaggagctcctttcttatgcagatccatcaggccagaccatctcggccaacatggttgccaagtacaagcagtacggaagagacttgagactgctcaaggagcttacacgtacatatgcgccacagaaatacgacttatttttccgtggtgagacatatgcggggtcaagcgactacgtcgtagacgaggcgcgggggtatacccgatataaccttggtaccacaaaggcgaactatgatgacttccagaagtcagtcaaggaactcttcaagggaacggatgcgctgcaggatgagcgttaccaagagatgatggtagcctttggcgagcagaagtttcttcgcaggctcaagacgagcgataacgggagcatctactaccagcttcatctagaggagttgcataccatcctcgaaaaccaggggaaacactatcccttcctcctgtctgaagaagacaagattgagtcgctcgtgtccttcaggattccctattatgtggggccgcttaccaggaaaaatgccgcgattggccatgacggtaaagagcgctttgcatggtcatcacgcaaggatggtatggagcatgctgtcatcaccccatggaactgggaagagatcatcgatcgcgataagagtgccgaagacttcataatgcgcatgacgggtgactgcacctacctccagggggagcccgtcctccccaagtgctctctgctctatgaggaattctgtgctctcaacgaatttaacggtgcgcattggacggttgatggggacgatgagcgtcgttttgacgccgcccaacgcgagcgcatcatgtgcgacttgttcagaagaactcgttccgtcacatacaataaggtctccgattggttggagcgcaaatacaattttacaggtgctcgtgtgcgcggaggacagggagagcatgggtttgagtcaaagctcggctcgtatatcttcttctgtaaggacgtattcaaaactgacgggctggacgaggccgactatacgatgatcgagcagatcatcctttggagcacgctatttgaggatagggacattctcaagcggaagatcgaggaagcatacggtggtgataggctgacctccgagcagataaaggtcatctgcaagaaacgctttacgggctggggacggctatcgaagagactcctcacggacattaaggtcaatacggatactggtcgcaagtcgattatggatgtgctgcgtgaggggaatccgaacaatggccaacgttctcgcacgatggtctttatggaagtgctccgtgacgaggaccttggcttccagaaggctattgatggcctcaacagggattatttccgcgagcacaataatggccttatggatgtaaatgacctacctgggtctcctgcgattcggagaagtatcaaccaggctgtacgcattgtggatgagatcgcctctattgcgaggaaagagcccaccaacatcttcattgaggtgacacgtgaggaggatgatccacgcaagaaaggcaagcgcaccaagagacgctatgacgcaatcaagagcgccctcgaaaaatttaagaaagatgatccatcgctttggaaagaactgtgcgaaaaagcaccgggggatatggacgaacggctctcgttgtacttcatgcaacggggtaagtgcatgtactcagggcgtccaatcaagattgaggagctacatactggaaaatacgaggttgatcacatcattccacgctcgtacataaaggatgacagcttcgagaacaaggtgctcgtgtaccgcgaggagaaccagcataagacggacgcgttgcttatcgattcctctatcaggcagaagatgggcggatactggcgtatgctgcatgacgcaaagctggtgggcgacaagaagttcaggaatctcttccgcaaccatattgatgataaggccatgaaggggtttgtcgcgcggcagatcgtcgagaccagccagatggtcaagcttgttcagacactgtttgaggcgaggtatccaaacacgcggatcgtgccggtgaaggctggcatctcgcatgatttgcgtgaagcagctggtctagtcaaatgccgtgaggccaatgatttccaccatgcgcacgacgctttccttgcctgtcgtatcggcctcttcatccagaagcgtcatcccagcgtctatgacaatcccattgggcttgcgcgcatcatgcgcgactatgctcgtatgcaggcgcgggagtataagaagtctcactgtcttgcacatacgcagggctttatcgttaacagcttccttagctcgggttttgatgaggagacaggcgagatattcaaggacgattgggatgctaaggctgaggtcgaggggatccgtcgcgtgcttaactgtcgccagtgctttataagccgtatgcccgtggagggagatacacgatatggtggccgctattggggagagacaatatattctcctaagggcaagcataagcatgagatacctctgaagcaagggcttgacccaaatctgtatggtggctactccgacctgctttactcatactttcttatttatgaagcgagtgacgtctcgtcgggagaaagagtactcaggttcataggaatcccgacatccattgctgctcgaatggccaatcagaaaaggctggaagaatacgtttctcgtctagctctccaagagaatcttgaacatgttcgcatggttcgcaagataatgaaaaagcagctgattgaagtagataactgcaggctgttggtaactgctgcagatgcagtaaccaacgcaactgaactcgctttttcgctagatgagatgaagataataagtacctgtgccaagtgcatcaatggagcagatcctagcgctatcgataaaattggcaatgctcaagatagtttctttgacaacttgaagcggaggggctctgataggtgcgcccttttattttcccagttaaagctcgacaaactttctcaaaacttttatatgatctcttccgacgataaatctaaaatccttatcagcattctggacaggattagggctaagagtaattcggttgacttgagcttagttgggggagcaaagcatgctgcccagatgaagttcgacttcaatgcaaagttgaataatcctgctagcagctttgtcctcatcgaccagtccgtgacaggcatgtttgagaggcggactcgcattgggctttag

SEQ ID NO: 389 - DNA, 132 bp, Artificial
  Lactobacillus gasseri CRISPR-Cas single guide
tttaattgcataacataatctaatgctggagttttagatggtcgaaaccagatttaaaatcaagcaatgcatcttttgatgcaaagtttcaatacttgtcccgagctatcgagggacttttttggatccaca

SEQ ID NO: 390 - DNA, 131 bp, Artificial
  Lactobacillus gasseri CRISPR-Cas single guide
tttaattgcataacataatctaatgctggattttagatggtcgaaaccagatttaaaatcaagcaatgcatcttttgatgcaaagtttcaatacttgtcccgagctatcgagggacttttttggatccaca

SEQ ID NO: 391 - DNA, 132 bp, Artificial
  Lactobacillus gasseri CRISPR-Cas single guide
tttaattgcataacataatctaatgctggagtggtagatggtcgaaaccagatttaaaatcaagcaatgcatcttttgatgcaaagtttcaatacttgtcccgagctatcgagggacttttttggatccaca

SEQ ID NO: 392 - DNA, 132 bp, Artificial
  Lactobacillus gasseri CRISPR-Cas single guide
tttaattgcataacataatctaatgctggagggggagatggtcgaaaccagatctcccctcaagcaatgcatcttttgatgcaaagtttcaatacttgtcccgagctatcgagggacttttttggatccaca

SEQ ID NO: 393 - DNA, 134 bp, Artificial
  Lactobacillus gasseri CRISPR-Cas single guide
tttaattgcataacataatctaatgctggagttttagatggtcgaaaccagatttaaaatcccaagcaatgcatcttttgatgcaaagtttcaatacttgtcccgagctatcgagggacttttttggatccaca

SEQ ID NO: 394 - DNA, 127 bp, Artificial
  Lactobacillus gasseri CRISPR-Cas single guide
tttaattgcataacataatctaatgctggagttttagatggtcgaaaccagatttaaaatcaagcaagccttttggcaaagtttcaatacttgtcccgagctatcgagggacttttttggatccaca

SEQ ID NO: 395 - DNA, 132 bp, Artificial
  Lactobacillus gasseri CRISPR-Cas single guide
tttaattgcataacataatctaatgctggagttttagatggtcgaaaccagatttaaaatcgggcaatgcatcttttgatgcaaagccccaatacttgtcccgagctatcgagggacttttttggatccaca

SEQ ID NO: 396 - DNA, 134 bp, Artificial
  Lactobacillus gasseri CRISPR-Cas single guide
tttaattgcataacataatctaatgctggagttttagatggtcgaaaccagatttaaaatcaaagcaatgcatcttttgatgcaaagttttcaatacttgtcccgagctatcgagggacttttttggatccaca

SEQ ID NO: 397 - DNA, 132 bp, Artificial
  Lactobacillus gasseri CRISPR-Cas single guide
tttaattgcataacataatctaatgctggagttttagatggtcgaaaccagatttaaaatcaagcaatgcatcttttgatgcaaagcttcaatacttgtcccgagctatcgagggacttttttggatccaca

SEQ ID NO: 398 - DNA, 132 bp, Artificial
  Lactobacillus gasseri CRISPR-Cas single guide
tttaattgcataacataatctaatgctggagttttagatggtcgaaaccagatttaaaatcaagcaatgcatcttttgatgcaaggtttcaatacttgtcccgagctatcgagggacttttttggatccaca

SEQ ID NO: 399 - DNA, 124 bp, Artificial
  Lactobacillus gasseri CRISPR-Cas single guide
tttaattgcataacataatctaatgctggagttttagacgaagatttaaaatcaagcaatgcatcttttgatgcaaagtttcaatacttgtcccgagctatcgagggacttttttggatccaca

SEQ ID NO: 400 - DNA, 132 bp, Artificial
  Lactobacillus gasseri CRISPR-Cas single guide
tttaattgcataacataatctaatgctggagttttagatggtcgaaaccagatttaaaatcaagcaatgcatcttttgatgcaaagtttgtttacttgtcccgagctatcgagggacttttttggatccaca

SEQ ID NO: 401 - DNA, 132 bp, Artificial
  Lactobacillus gasseri CRISPR-Cas single guide
tttaattgcataacataatctaatgctggagaaaattttggtcgaaaccagatttttagacaagcaatgcatcttttgatgcaaagtttcaatacttgtcccgagctatcgagggacttttttggatccaca

SEQ ID NO: 402 - DNA, 132 bp, Artificial
  Lactobacillus gasseri CRISPR-Cas single guide
tttaattgcataacataatctaatgctggagctttagatggtcgaaaccagatttaaagtcaagcaatgcatcttttgatgcaaagtttcaatacttgtcccgagctatcgagggacttttttggatccaca

1. A synthetic nucleic acid construct, comprising:
(a) a crRNA comprising a 3′ region and a 5′ region, wherein the 3′ region comprises at least about 10 consecutive nucleotides of a CRISPR repeat, and/or a functional fragment of the CRISPR repeat, and the 5′ region comprises at least about 20 consecutive nucleotides of a spacer sequence located immediately upstream of the repeat;
(b) a tracrRNA comprising a 5′ and a 3′ region, wherein at least a portion of the 5′ region of the tracrRNA is complementary to the 3′ region (i.e., CRISPR repeat) of the crRNA,
wherein, when the 5′ region of the tracrRNA that is complementary to the 3′ region of the crRNA hybridizes to the 3′ region of the crRNA, the synthetic nucleic acid construct forms secondary structures from 5′ to 3′ of:
(i) a stem, the stem comprising a duplex between the 5′ end of the tracrRNA and the repeat of the crRNA, and optionally, the stem further comprising a kink or a bulge;
(ii) a nexus hairpin;
(iii) at least one terminal hairpin; and
(c) optionally, a linker that when present links the 3′end of the crRNA to the 5′ end of the tracrRNA (i.e., linking the 3′ end and 5′ end of the stem),
wherein the construct comprises an insertion, substitution, and/or deletion of about one to about five nucleotides or base pairs in the nexus hairpin as compared to a wild type Type II crRNA:tracrRNA duplex; and/or
an insertion, substitution and/or deletion of about one to about nine nucleotides and/or base pairs (e.g., 1, 2, 3, 4, 5, 6, 7, 8, 9) in the stem as compared to a wild type Type II crRNA:tracrRNA duplex.

2. The synthetic nucleic acid construct of claim 1, wherein the insertion, substitution and/or deletion increases the GC content of the synthetic nucleic acid construct as compared to a wild type Type II crRNA:tracrRNA duplex.

3. The synthetic nucleic acid construct of claim 1, wherein at least one substitution comprises replacing a complementary base pair with a pair of non-complementary (unmatched) nucleotides.

4. The synthetic nucleic acid construct of claim 1, wherein at least one substitution comprises replacing a complementary base pair with a different complementary base pair.

5. The synthetic nucleic acid construct of claim 1, wherein at least one substitution comprises replacing a pair of non-complementary nucleotides with a different pair of non-complementary nucleotides.

6. The synthetic nucleic acid construct of claim 1, wherein at least one substitution comprises replacing a pair of non-complementary nucleotides with a pair of complementary nucleotides.

7-9. (canceled)

10. An expression cassette comprising the crRNA and/or the tracrRNA of the synthetic nucleic acid construct of claim 1.

11. A vector comprising the expression cassette of claim 10.

12. A cell comprising the crRNA and/or the tracrRNA of the synthetic nucleic acid construct of claim 1.

13. The cell of claim 12, wherein the cell is a plant cell, bacteria cell, fungal cell, animal cell, mammalian cell, insect cell, or archaeon cell.

14. A method of producing a modified Type II crRNA:tracrRNA construct, comprising:
(a) inserting, substituting, and/or deleting about one to about five nucleotides or base pairs in the nexus hairpin of a Type II crRNA:tracrRNA; and/or
(b) inserting, substituting, and/or deleting about one to about nine nucleotides and/or base pairs in a stem of the Type II crRNA:tracrRNA,
wherein the crRNA comprises a 3′ region and a 5′ region, the 3′ region comprising at least about 10 consecutive nucleotides of a CRISPR repeat, and/or a functional fragment of the repeat, and the 5′ region comprises at least about 20 consecutive nucleotides of a spacer sequence located immediately upstream of the repeat, and the tracrRNA comprises a 5′ and a 3′ region, and at least a portion of the 5′ region of the tracrRNA is complementary to the 3′ region of the crRNA,
further wherein, when the 5′ region of the tracrRNA that is complementary to the 3′ region of the crRNA hybridizes to the 3′ region of the crRNA, the Type II crRNA:tracrRNA forms secondary structures from 5′ to 3′ of:
(i) a stem, the stem comprising a duplex between the 5′ end of the tracrRNA and the repeat of the crRNA, and optionally, the stem further comprising a kink or a bulge;
(ii) a nexus hairpin;
(iii) at least one terminal hairpin; and
(c) optionally, a linker that when present links the 3′end of the crRNA to the 5′ end of the tracrRNA (i.e., linking the 3′ end and 5′ end of the stem), thereby producing a modified Type II crRNA:tracrRNAs construct.

15. A modified Type II crRNA:tracrRNA construct produced by the method of claim 14.

16. A method of modifying the activity of a Cas9 polypeptide, comprising complexing the Cas9 polypeptide with a synthetic nucleic acid construct of claim 1, thereby modifying the activity of a Cas9 polypeptide as compared to a Cas9 polypeptide complexed with a wild type Type II crRNA:tracrRNA duplex.

17. The method of claim 16, wherein the activity of the Cas9 polypeptide when complexed with the synthetic nucleic acid construct is increased as compared to a Cas9 polypeptide complexed with a wild type Type II crRNA:tracrRNA duplex.

18. The method of claim 16, wherein the activity of the Cas9 polypeptide when complexed with the synthetic nucleic acid construct is decreased as compared to a Cas9 polypeptide complexed with a wild type Type II crRNA:tracrRNA duplex.

19. A method of controlling transcription of a target DNA, comprising:
contacting the target DNA with the synthetic nucleic acid construct of claim 1 and/or an expression cassette and/or vector comprising the synthetic nucleic acid construct, in the presence of a Cas9 polypeptide, wherein the synthetic nucleic acid construct binds to the target DNA, thereby controlling the transcription of the target DNA.

20. (canceled)

21. A method for site-specific cleavage of a target DNA, comprising:
contacting the target DNA with the synthetic nucleic acid construct of claim 1 and/or an expression cassette and/or a vector comprising the synthetic nucleic acid construct, in the presence of a Cas9 polypeptide, thereby producing a site specific cleavage of the target DNA in a region defined by complementary binding of the spacer sequence of the crRNA of said synthetic nucleic acid construct to the target DNA.

22. (canceled)

23. A method of editing a target DNA, comprising:
contacting the target DNA with the synthetic nucleic acid construct of claim 1 and/or an expression cassette and/or a vector comprising the synthetic nucleic acid construct, in the presence of a Cas9 polypeptide, wherein the synthetic nucleic acid construct binds to the target DNA, thereby editing the target DNA.

24-28. (canceled)

29. The method of claim 21, wherein the target DNA is a double stranded target DNA and the site specific cleavage is a site specific nicking of a (+) strand of the double stranded target DNA and the Cas9 polypeptide comprises a point mutation in an RuvC active site motif and thereby cleaving the (+) strand of the double stranded DNA and producing a site-specific nick in the double stranded target DNA.

30. The method of claim 21, wherein the target DNA is a double stranded target DNA and the site specific cleavage is a site specific nicking of a (−) strand of the double stranded target DNA and the Cas9 polypeptide comprises a point mutation in an HNH active site motif and thereby cleaving the (−) strand of the double stranded DNA and producing a site-specific nick in the double stranded target DNA.
